(19) United States
(12) Patent Application Publication
(10) Pub. No.: US 2025/0295137 A1
(43) Pub. Date: Sep. 25, 2025

(54) PROBIOTIC COMPOSITIONS FOR AQUACULTURE

(71) Applicant: BiomEdit, LLC, Fishers, IN (US)

(72) Inventors: Arvind Kumar, Fishers, IN (US); Dharanesh Mahimapura Gangaiah, Fishers, IN (US); Hannah Bekebrede, Fishers, IN (US)

(21) Appl. No.: 18/692,412

(22) PCT Filed: Sep. 19, 2022
(86) PCT No.: PCT/US2022/043996

§ 371 Date: Mar. 15, 2024

Related U.S. Application Data
(60) Provisional application No. 63/245,791, filed on Sep. 17, 2021.
(60) Provisional application No. 63/293,168, filed on Dec. 23, 2021.

(51) Int. Cl. A23K 10/16; A23K 20/163; A23K 20/174; A23K 20/20; A23K 50/75; A23K 50/80; C12N 1/20; C12R 1/07; C12R 1/225

(52) U.S. Cl. CPC A23K 10/16; A23K 20/163; A23K 20/174; A23K 20/20; A23K 50/75; A23K 50/80; C12N 1/20; C12R 2001/07; C12R 2001/225

(57) ABSTRACT

Disclosed are probiotic compositions and methods for improving animal health and animal production. The probiotic compositions include two or more novel Lactilactobacillus strains which are capable of colonizing the gastrointestinal tract to improve the health of an animal. A probiotic composition includes Lactilactobacillus curvatus and a second Lactilactobacillus strain. The second Lactilactobacillus strain can include a second strain of Lactilactobacillus curvatus, Lactilactobacillus sakei, Lactilactobacillus fuchuensis, and combinations thereof, and a carrier suitable for animal administration. Also disclosed are Bacillus strains.

### CROSS-REFERENCE TO RELATED APPLICATIONS

[0001] This application is a national stage application which claims priority from PCT Application No. PCT/US2022/043996 filed Sep. 19, 2022, which in turn claims priority to U.S. provisional application Ser. No. 63/245,791 filed Sep. 17, 2021 and 63/293,168 filed Dec. 23, 2021, all of which are incorporated herein by reference in their entireties.

### SEQUENCE LISTING XML

[0002] The instant application contains a Sequence Listing encoded in XML format which has been filed electronically by EFS-web and is hereby incorporated by reference in its entirety. Said XML format Sequence Listing, created on Nov. 8, 2024, is named “2950-5 PCT_US_ST26.xml” and is 35,960,286 bytes in size.

### FIELD

[0003] The present invention relates to probiotic compositions and methods for improving animal health. The probiotic compositions include one or more isolated strains of Lactobacillus species which colonizes the gastrointestinal tract to improve the health and production performance of an animal.

### BACKGROUND

[0004] Direct fed microbials (DFMs), often also called probiotics, are microorganisms which colonize the gastrointestinal tract of an animal and provide some beneficial effect to that animal. The microorganisms can be bacterial species, for example, those from the genera Bacillus, Lactobacillus, Lactococcus, and Enterococcus. The microorganisms can also be yeast or even molds. The microorganisms can be provided to an animal orally or mucosally or, in the case of birds, provided to a fertilized egg, i.e., in ovo.

[0005] The beneficial activity provided by a DFM can be through the synthesis and secretion of vitamins or other nutritional molecules needed for a healthy metabolism of the host animal. A DFM can also protect the host animal from disease, disorders, or clinical symptoms caused by pathogenic microorganisms or other agents. For example, the DFM may naturally produce factors having inhibitory or cytotoxic activity against certain species of pathogens, such as deleterious or disease-causing bacteria.

[0006] Probiotics and DFMs provide an attractive alternative or addition to the use and application of antibiotics in animals. Antibiotics can promote resistant or less sensitive bacteria and can ultimately end up in feed products or foods consumed by other animals or humans. There is a need in the art for probiotic compositions and methods that provide improved delivery of beneficial molecules to the gastrointestinal tract of an animal and thus improve animal health.

[0007] The citation of references herein shall not be construed as an admission that such is prior art to the present disclosure.

### SUMMARY

[0008] An aspect of the disclosure is a probiotic composition including Lactilactobacillus species. The Lactilactobacillus species includes a first Lactilactobacillus curvatus strain and a second Lactilictobacillus strain, and a carrier suitable for animal administration.

[0009] In an embodiment, the second Lactilactobacillus strain comprises at least one of a second Lactilactobacillus curvatus strain, Lactilactobacillus sakei, Lactilactobacillus fuchuensis and combinations thereof.

[0010] In embodiments, the Lactilactobacillus strains of the disclosure include any combination of any two, three, four or more of the following isolated Lactilactobacillus strains and any combination of any two, three, four or more of the following strains having at least 97% identity, 98% identity, 98.5% identity, 98.6% identity, 98.7% identity, 98.8% identity, 98.9% identity, 99% identity, 99.1% identity, 99.2% identity, 99.3% identity, 99.4% identity, or 99.5% identity in genomic sequence to the genomic sequence of any of the SEQ ID NOS: 1-19. Further Lactilactobacillus strains of this disclosure include any combination of any two, three, four or more strains having at least 80% identity, 90% identity, 95% identity, 97% identity, 98% identity, 99% identity in sequence to the coding sequences of SEQ ID NOS: 1-19 or a portion or portions thereof. The whole genome nucleic acid sequences for the Lactilactobacillus strains of Table 1 are provided in SEQ ID NOS: 1-19.

TABLE 1
Accession numbers of Lactilactobacillus strains of the disclosure.

| | Isolated | Bioproject | SEQ ID |
|---|---|---|---|
| Organism | strains | accession | NO: |
| Lactilactobacillus | ELA204093 | PRJNA762592 | 1 |
| curvatus | | | |
| Lactilactobacillus | ELA204100 | PRJNA762592 | 2 |
| curvatus | | | |
| Lactilactobacillus | ELA214388 | PRJNA762592 | 3 |
| curvatus | | | |
| Lactilactobacillus | ELA214391 | PRJNA762593 | 4 |
| sakei | | | |
| Lactilactobacillus | ELA214002 | PRJNA762592 | 5 |
| curvatus | | | |
| Lactilactobacillus | ELA204023 | PRJNA762592 | 6 |
| curvatus | | | |
| Lactilactobacillus | ELA204029 | PRJNA762592 | 7 |
| curvatus | | | |
| Lactilactobacillus | ELA204033 | PRJNA762592 | 8 |
| curvatus | | | |
| Lactilactobacillus | ELA214059 | PRJNA762592 | 9 |
| curvatus | | | |
| Lactilactobacillus | ELA214060 | PRJNA762592 | 10 |
| curvatus | | | |
| Lactilactobacillus | ELA214061 | PRJNA762592 | 11 |
| curvatus | | | |
| Lactilactobacillus | ELA214062 | PRJNA762592 | 12 |
| curvatus | | | |
| Lactilactobacillus | ELA204092 | PRJNA762592 | 13 |
| curvatus | | | |
| Lactilactobacillus | ELA204096 | PRJNA762592 | 14 |
| curvatus | | | |
| Lactilactobacillus | ELA204098 | PRJNA762592 | 15 |
| curvatus | | | |
| Lactilactobacillus | ELA214117 | PRJNA762592 | 16 |
| curvatus | | | |
| Lactilactobacillus | ELA214068 | PRJNA780402 | 17 |
| fuchuensis | | | |
| Lactilactobacillus | ELA214064 | PRJNA762593 | 18 |
| sakei | | | |
| Lactilactobacillus | ELA214065 | PRJNA762593 | 19 |
| sakei | | | |

[0011] In an embodiment, the first Lactilactobacillus curvatus strain includes any of the following strains:
[0012] Lactilactobacillus curvatus ELA204093 corresponding to ATCC deposit PTA-127116, Lactilactobacillus curvatus ELA204100 corresponding to ATCC deposit PTA-127117 and Lactilactobacillus curvatus ELA214388 corresponding to ATCC deposit PTA-127118, and combinations thereof, or
[0013] a Lactilactobacillus strain having at least 97% identity, 98% identity, 98.5% identity, 98.6% identity, 98.7% identity, 98.8% identity, 98.9% identity, 99% identity, 99.1% identity, 99.2% identity, 99.3% identity, 99.4% identity, or 99.5% identity in genomic sequence to the sequence of SEQ ID NOS: 1-3, and combinations thereof.

[0014] In an embodiment the second Lactilactobacillus strain comprises any of the following strains which is different than the first Lactilactobacillus curvatus strain:
[0015] Lactilactobacillus curvatus ELA204093 corresponding to ATCC deposit PTA-127116, Lactilactobacillus curvatus ELA204100 corresponding to ATCC deposit PTA-127117, Lactilactobacillus curvatus ELA214388 corresponding to ATCC deposit PTA-127118, Lactilactobacillus sakei ELA214391 corresponding to ATCC deposit PTA-127119 and combinations thereof, or
[0016] a Lactilactobacillus strain having at least 97% identity, 98% identity, 98.5% identity, 98.6% identity, 98.7% identity, 98.8% identity, 98.9% identity, 99% identity, 99.1% identity, 99.2% identity, 99.3% identity, 99.4% identity, or 99.5% identity in genomic sequence to the sequence of SEQ ID NOS: 1-4, and combinations thereof.

[0017] In an embodiment the first Lactilactobacillus curvatus strain includes any of the following strains:
[0018] at least one of Lactilactobacillus curvatus ELA214002, Lactilactobacillus curvatus ELA204023, Lactilactobacillus curvatus ELA204029, Lactilactobacillus curvatus ELA204033, Lactilactobacillus curvatus ELA214059, Lactilactobacillus curvatus ELA214060, Lactilactobacillus curvatus ELA214061, Lactilactobacillus curvatus ELA214062, Lactilactobacillus curvatus ELA204092, Lactilactobacillus curvatus ELA204096, Lactilactobacillus curvatus ELA204098, Lactilactobacillus curvatus ELA214117; or
[0019] at least one Lactilactobacillus strain having at least 97% identity, 98% identity, 98.5% identity, 98.6% identity, 98.7% identity, 98.8% identity, 98.9% identity, 99% identity, 99.1% identity, 99.2% identity, 99.3% identity, 99.4% identity, or 99.5% identity in genomic sequence to any of sequences of SEQ ID NO: 5-16; and combinations thereof.

[0020] In an embodiment, a) the first Lactilactobacillus curvatus strain includes any of the following strains:
[0021] at least one of Lactilactobacillus curvatus ELA214002, Lactilactobacillus curvatus ELA204023, Lactilactobacillus curvatus ELA204029, Lactilactobacillus curvatus ELA204033, Lactilactobacillus curvatus ELA214059, Lactilactobacillus curvatus ELA214060, Lactilactobacillus curvatus ELA214061, Lactilactobacillus curvatus ELA214062, Lactilactobacillus curvatus ELA204092, Lactilactobacillus curvatus ELA204096, Lactilactobacillus curvatus ELA204098, Lactilactobacillus curvatus ELA214117; and combinations thereof; or
[0022] at least one Lactilactobacillus strain having at least 97% identity, 98% identity, 98.5% identity, 98.6% identity, 98.7% identity, 98.8% identity, 98.9% identity, 99% identity, 99.1% identity, 99.2% identity, 99.3% identity, 99.4% identity, or 99.5% identity in genomic sequence to any of sequences of SEQ ID NO: 5-16; and combinations thereof; and
[0023] b) the second Lactilactobacillus strain comprises any of the following strains which is different than the first Lactilactobacillus curvatus strain:
[0024] at least one of Lactilactobacillus curvatus ELA214002, Lactilactobacillus curvatus ELA204023, Lactilactobacillus curvatus ELA204029, Lactilactobacillus curvatus ELA204033, Lactilactobacillus curvatus ELA214059, Lactilactobacillus curvatus ELA214060, Lactilactobacillus curvatus ELA214061, Lactilactobacillus curvatus ELA214062, Lactilactobacillus curvatus ELA204092, Lactilactobacillus curvatus ELA204096, Lactilactobacillus curvatus ELA204098, Lactilactobacillus curvatus ELA214117, Lactilactobacillus fuchuensis ELA214068, Lactilactobacillus sakei ELA214064, Lactilactobacillus sakei ELA214065; or
[0025] at least one Lactilactobacillus strain having at least 97% identity, 98% identity, 98.5% identity, 98.6% identity, 98.7% identity, 98.8% identity, 98.9% identity, 99% identity, 99.1% identity, 99.2% identity, 99.3% identity, 99.4% identity, or 99.5% identity in genomic sequence to any of sequences of SEQ ID NO: 5-19; and combinations thereof.

[0026] In an embodiment, a) the first Lactilactobacillus curvatus strain includes any of the following strains:
[0027] Lactilactobacillus curvatus ELA204093 corresponding to ATCC deposit PTA-127116, Lactilactobacillus curvatus ELA204100 corresponding to ATCC deposit PTA-127117 and Lactilactobacillus curvatus ELA214388 corresponding to ATCC deposit PTA-127118, and combinations thereof, or
[0028] a Lactilactobacillus strain having at least 97% identity, 98% identity, 98.5% identity, 98.6% identity, 98.7% identity, 98.8% identity, 98.9% identity, 99% identity, 99.1% identity, 99.2% identity, 99.3% identity, 99.4% identity, or 99.5% identity in genomic sequence to the sequence of SEQ ID NOS: 1-3, and combinations thereof; and
[0029] b) wherein the first Lactilactobacillus curvatus strain further includes at least one of Lactilactobacillus curvatus ELA214002, Lactilactobacillus curvatus ELA204023, Lactilactobacillus curvatus ELA204029, Lactilactobacillus curvatus ELA204033, Lactilactobacillus curvatus ELA214059, Lactilactobacillus curvatus ELA214060, Lactilactobacillus curvatus ELA214061, Lactilactobacillus curvatus ELA214062, Lactilactobacillus curvatus ELA204092, Lactilactobacillus curvatus ELA204096, Lactilactobacillus curvatus ELA204098, Lactilactobacillus curvatus ELA214117, and combinations thereof; or
[0030] at least one Lactilactobacillus strain having at least 97% identity, 98% identity, 98.5% identity, 98.6% identity, 98.7% identity, 98.8% identity, 98.9% identity, 99% identity, 99.1% identity, 99.2% identity, 99.3% identity, 99.4% identity, or 99.5% identity in genomic sequence to any of sequences of SEQ ID NO: 5-16; and combinations thereof.

[0031] In an embodiment, a) the first Lactilactobacillus curvatus strain includes any of the following strains:
[0032] Lactilactobacillus curvatus ELA204093 corresponding to ATCC deposit PTA-127116, Lactilactobacillus curvatus ELA204100 corresponding to ATCC deposit PTA-127117 and Lactilactobacillus curvatus ELA214388 corresponding to ATCC deposit PTA-127118, and combinations thereof, or
[0033] a Lactilactobacillus strain having at least 97% identity, 98% identity, 98.5% identity, 98.6% identity, 98.7% identity, 98.8% identity, 98.9% identity, 99% identity, 99.1% identity, 99.2% identity, 99.3% identity, 99.4% identity, or 99.5% identity in genomic sequence to the sequence of SEQ ID NOS: 1-3, and combinations thereof; and
[0034] b) the second Lactilactobacillus strain comprises any of the following strains which is different than the first Lactilactobacillus curvatus strain:
[0035] at least one of Lactilactobacillus curvatus ELA214002, Lactilactobacillus curvatus ELA204023, Lactilactobacillus curvatus ELA204029, Lactilactobacillus curvatus ELA204033, Lactilactobacillus curvatus ELA214059, Lactilactobacillus curvatus ELA214060, Lactilactobacillus curvatus ELA214061, Lactilactobacillus curvatus ELA214062, Lactilactobacillus curvatus ELA204092, Lactilactobacillus curvatus ELA204096, Lactilactobacillus curvatus ELA204098, Lactilactobacillus curvatus ELA214117, Lactilactobacillus fuchuensis ELA214068, Lactilactobacillus sakei ELA214064, Lactilactobacillus sakei ELA214065; and combinations thereof; or
[0036] at least one Lactilactobacillus strain having at least 97% identity, 98% identity, 98.5% identity, 98.6% identity, 98.7% identity, 98.8% identity, 98.9% identity, 99% identity, 99.1% identity, 99.2% identity, 99.3% identity, 99.4% identity, or 99.5% identity in genomic sequence to any of sequences of SEQ ID NO: 5-19; and combinations thereof.

[0037] An embodiment is a probiotic composition including isolated Lactilactobacillus species, and a carrier suitable for animal administration. The isolated Lactilactobacillus species comprises at least two of the following:
[0038] ELA204093 corresponding to ATCC deposit PTA-127116 (PTA-16) or a Lactilactobacillus strain having at least 97% identity, 98% identity, 98.5% identity, 98.6% identity, 98.7% identity, 98.8% identity, 98.9% identity, 99% identity, 99.1% identity, 99.2% identity, 99.3% identity, 99.4% identity, or 99.5% identity in genomic sequence to the sequence of SEQ ID NO: 1;
[0039] ELA204100 corresponding to ATCC deposit PTA-127117 (PTA-17) or a Lactilactobacillus strain having at least 97% identity, 98% identity, 98.5% identity, 98.6% identity, 98.7% identity, 98.8% identity, 98.9% identity, 99% identity, 99.1% identity, 99.2% identity, 99.3% identity, 99.4% identity, or 99.5% identity in genomic sequence to the sequence of SEQ ID NO: 2;
[0040] ELA214388 corresponding to ATCC deposit PTA-127118 (PTA-18) or a Lactilactobacillus strain having at least 97% identity, 98% identity, 98.5% identity, 98.6% identity, 98.7% identity, 98.8% identity, 98.9% identity, 99% identity, 99.1% identity, 99.2% identity, 99.3% identity, 99.4% identity, or 99.5% identity in genomic sequence to the sequence of SEQ ID NO: 3; or
[0041] ELA214391 corresponding to ATCC deposit PTA-127119 (PTA 19) or a Lactilactobacillus strain having at least 97% identity, 98% identity, 98.5% identity, 98.6% identity, 98.7% identity, 98.8% identity, 98.9% identity, 99% identity, 99.1% identity, 99.2% identity, 99.3% identity, 99.4% identity, or 99.5% identity in genomic sequence to the sequence of SEQ ID NO: 4.

[0042] In an embodiment a probiotic composition includes a first isolated Lactilactobacillus curvatus strain and a second isolated Lactilactobacillus strain; and a carrier suitable for animal administration;
[0043] wherein the composition reduces or inhibits the colonization of an animal by a pathogenic bacterium or provides improved growth performance in an animal when an effective amount is administered to an animal, as compared to an animal not administered the composition; and
[0044] wherein the first isolated Lactilactobacillus curvatus strain comprises a nucleic acid sequence having at least 97% identity, 98% identity, 98.5% identity, 98.6% identity, 98.7% identity, 98.8% identity, 98.9% identity, 99% identity, 99.1% identity, 99.2% identity, 99.3% identity, 99.4% identity, or 99.5% identity in genomic sequence to the sequence of SEQ ID NO: 1 and wherein the second isolated Lactilactobacillus strain comprises a nucleic acid sequence having at least 97% identity, 98% identity, 98.5% identity, 98.6% identity, 98.7% identity, 98.8% identity, 98.9% identity, 99% identity, 99.1% identity, 99.2% identity, 99.3% identity, 99.4% identity, or 99.5% identity in genomic sequence to the sequence of SEQ ID NO: 2; or
[0045] wherein the first isolated Lactilactobacillus curvatus strain comprises a nucleic acid sequence having at least 97% identity, 98% identity, 98.5% identity, 98.6% identity, 98.7% identity, 98.8% identity, 98.9% identity, 99% identity, 99.1% identity, 99.2% identity, 99.3% identity, 99.4% identity, or 99.5% identity in genomic sequence to the sequence of SEQ ID NO: 3 and wherein the second isolated Lactilactobacillus strain comprises a nucleic acid sequence having at least 97% identity, 98% identity, 98.5% identity, 98.6% identity, 98.7% identity, 98.8% identity, 98.9% identity, 99% identity, 99.1% identity, 99.2% identity, 99.3% identity, 99.4% identity, or 99.5% identity in genomic sequence to the sequence of SEQ ID NO: 4.

[0046] In an embodiment a probiotic composition includes a first isolated Lactilactobacillus curvatus strain and a second isolated Lactilactobacillus strain; and a carrier suitable for animal administration;
[0047] wherein the composition reduces or inhibits the colonization of an animal by a pathogenic bacterium or provides improved growth performance in an animal when an effective amount is administered to an animal, as compared to an animal not administered the composition; and
[0048] wherein the first isolated Lactilactobacillus curvatus strain comprises a nucleic acid sequence having at least 97% identity, 98% identity, 98.5% identity, 98.6% identity, 98.7% identity, 98.8% identity, 98.9% identity, 99% identity, 99.1% identity, 99.2% identity, 99.3% identity, 99.4% identity, or 99.5% identity in genomic sequence to the sequence of SEQ ID NO: 1, and wherein the second isolated Lactilactobacillus strain comprises a nucleic acid sequence having at least 97% identity, 98% identity, 98.5% identity, 98.6% identity, 98.7% identity, 98.8% identity, 98.9% identity, 99% identity, 99.1% identity, 99.2% identity, 99.3% identity, 99.4% identity, or 99.5% identity in genomic sequence to the sequence of SEQ ID NO: 3; or
[0049] wherein the first isolated Lactilactobacillus curvatus strain comprises a nucleic acid sequence having at least 97% identity, 98% identity, 98.5% identity, 98.6% identity, 98.7% identity, 98.8% identity, 98.9% identity, 99% identity, 99.1% identity, 99.2% identity, 99.3% identity, 99.4% identity, or 99.5% identity in genomic sequence to the sequence of SEQ ID NO: 2; and wherein the second isolated Lactilactobacillus strain comprises a nucleic acid sequence having at least 97% identity, 98% identity, 98.5% identity, 98.6% identity, 98.7% identity, 98.8% identity, 98.9% identity, 99% identity, 99.1% identity, 99.2% identity, 99.3% identity, 99.4% identity, or 99.5% identity in genomic sequence to the sequence of SEQ ID NO: 4.

[0050] An embodiment of a composition includes:
[0051] ELA204093 corresponding to ATCC deposit PTA116 or a first Lactilactobacillus strain having at least 97% identity, 98% identity, 98.5% identity, 98.6% identity, 98.7% identity, 98.8% identity, 98.9% identity, 99% identity, 99.1% identity, 99.2% identity, 99.3% identity, 99.4% identity, or 99.5% identity in genomic sequence to the sequence of SEQ ID NO: 1; or
[0052] ELA204100 corresponding to ATCC deposit PTA-117 or a second Lactilactobacillus strain having at least 97% identity, 98% identity, 98.5% identity, 98.6% identity, 98.7% identity, 98.8% identity, 98.9% identity, 99% identity, 99.1% identity, 99.2% identity, 99.3% identity, 99.4% identity, or 99.5% identity in genomic sequence to the sequence of SEQ ID NO: 2; or
[0053] ELA214388 corresponding to ATCC deposit PTA-118 or a third Lactilactobacillus strain having at least 97% identity, 98% identity, 98.5% identity, 98.6% identity, 98.7% identity, 98.8% identity, 98.9% identity, 99% identity, 99.1% identity, 99.2% identity, 99.3% identity, 99.4% identity, or 99.5% identity in genomic sequence to the sequence of SEQ ID NO: 3; or
[0054] ELA214391 corresponding to ATCC deposit PTA-119 or a fourth Lactilactobacillus strain having at least 97% identity, 98% identity, 98.5% identity, 98.6% identity, 98.7% identity, 98.8% identity, 98.9% identity, 99% identity, 99.1% identity, 99.2% identity, 99.3% identity, 99.4% identity, or 99.5% identity in genomic sequence to the sequence of SEQ ID NO: 4;
[0055] wherein the composition includes at least one of the following combinations:
[0056] ELA204093 or the first Lactilactobacillus strain, and ELA204100 or the second Lactilactobacillus strain;
[0057] ELA214388 or the third Lactilactobacillus strain, and ELA214391 or the fourth Lactilactobacillus strain;
[0058] ELA204093 or the first Lactilactobacillus strain, and ELA214388 or the third Lactilactobacillus strain;
[0059] ELA204093 or the first Lactilactobacillus strain, and ELA214391 or the fourth Lactilactobacillus strain;
[0060] ELA204100 or the second Lactilactobacillus strain, and ELA214388 or the third Lactilactobacillus strain;
[0061] ELA204100 or the second Lactilactobacillus strain, and ELA214391 or the fourth Lactilactobacillus strain; and combinations thereof.

[0062] In some embodiments, a composition of the disclosure includes a first isolated Lactilactobacillus curvatus strain including ELA204093 and a second isolated Lactilactobacillus strain including ELA204100. In some embodiments, a composition of the disclosure includes a first isolated Lactilactobacillus curvatus strain including ELA214388 and a second isolated Lactilactobacillus strain including ELA214391. In some embodiments, a composition of the disclosure includes a first isolated Lactilactobacillus curvatus strain including ELA204093 and a second isolated Lactilactobacillus strain including ELA214391. In some embodiments, a composition of the disclosure includes a first isolated Lactilactobacillus curvatus strain including ELA204093 and a second isolated Lactilactobacillus strain including ELA214388. In some embodiments, a composition of the disclosure includes a first isolated Lactilactobacillus curvatus strain including ELA204100 and a second isolated Lactilactobacillus strain including ELA2214388. In some embodiments, a composition of the disclosure includes a first isolated Lactilactobacillus curvatus strain including ELA204100 and a second isolated Lactilactobacillus strain including ELA214391.

[0063] In embodiments, the Lactilactobacillus strains are selected from ELA204093 corresponding to ATCC deposit PTA-127116 or a Lactilactobacillus strain having at least 90% identity, 95% identity, 97% identity, 98% identity, 99% identity in genomic sequence to the sequence of ELA204093 corresponding to ATCC deposit PTA-127116; ELA204100 corresponding to ATCC deposit PTA-127117 or a Lactilactobacillus strain having at least 90% identity, 95% identity, 97% identity, 98% identity, 99% identity in genomic sequence to the sequence of ELA204100 corresponding to ATCC deposit PTA-127117; ELA214388 corresponding to ATCC deposit PTA-127118 or a Lactilactobacillus strain having at least 90% identity, 95% identity, 97% identity, 98% identity, 99% identity in genomic sequence to the sequence of ELA214388 corresponding to ATCC deposit PTA-127118; and ELA214391 corresponding to ATCC deposit PTA-127119 or a Lactilactobacillus strain having at least 90% identity, 95% identity, 97% identity, 98% identity, 99% identity in genomic sequence to the sequence of ELA214391 corresponding to ATCC deposit PTA-127119.

[0064] In some embodiments, the disclosure relates to related, homologous or derivative Lactilactobacillus strains having significant genome sequence identity to the genome sequence of any of the following Lactilactobacillus strains: Lactilactobacillus curvatus strain ELA204093 corresponding to ATCC deposit PTA-127116, Lactilactobacillus curvatus strain ELA204100 corresponding to ATCC deposit PTA-127117, Lactilactobacillus curvatus strain ELA214388 corresponding to ATCC deposit PTA-127118, and/or Lactilactobacillus sakei strain ELA214391 corresponding to ATCC deposit PTA-127119. Thus, derivative or similar or nearly genetically identical strains to the Lactilactobacillus strains provided herein are contemplated by and additional embodiments of the disclosure. Lactilactobacillus strains having 80% identity, 85% identity, 90% identity, 95% identity, 97% identity, 98% identity, 99% identity in genomic sequence to a strain provided and deposited in association with this disclosure are contemplated and are embodiments of the disclosure. Such derivative or similar or nearly genetically identical strains must similarly function as probiotics and have activity/capability or function in improving animal health and animal production and performance, including as detailed in the capability and activity or function of the strains and examples hereof.

[0065] In an embodiment a ratio of the first Lactilactobacillus curvatus strain and the second Lactilactobacillus strain is 0.75-1.5:1 or 1:0.75-1.5. In one embodiment, a composition is provided comprising strain ELA204093 and ELA204100 in equal amounts or at a ratio of 0.75-1.5:1. In one embodiment, a composition is provided comprising strain ELA214388 and ELA214391 in equal amounts or at a ratio of 0.75-1.5:1.

[0066] In an embodiment, the probiotic composition further includes a Bacillus species. The Bacillus species may be Bacillus velezensis, Bacillus subtilis, or a combination thereof.

[0067] In an embodiment, the probiotic composition includes at least one of the following bacterial species: B. velezensis ELA006, B. velezensis ELA014, B. subtilis ELA015, B. subtilis ELA017, B. subtilis ELA191105, B. amyloliquefaciens ELA202071, B. amyloliquefaciens ELA191024 and combinations thereof.

[0068] In an embodiment, a probiotic composition includes a mixture of the following bacterial species: B. amyloliquefaciens ELA191024, B. subtilis ELA191105 and B. amyloliquefaciens ELA202071.

### Bacillus Subtilis—Strain 105

[0069] Bacillus subtilis is a Gram-positive model bacterium which is widely used for industrial production of recombinant proteins such as alpha-amylase, protease, lipase, and other industrial enzymes. Because of the ability of the bacteria to produce large amounts of a target protein, and also to secrete large amounts of a target protein into the culture medium, and the availability of a low-cost downstream production and purification process, over 60% of commercial industrial enzymes are produced in Bacillus subtilis and relative Bacillus species (Schallmey, M.; Singh, A.; Ward, O. P. (2004) 50 (1): 1-17). In contrast to the frequently used recombinant protein expression host Escherichia coli, Bacillus subtilis has no risk of endotoxin contamination and has been certificated as a GRAS (generally regarded as safe) organism by the FDA, which makes it a choice for food-grade and pharmaceutical protein production.

[0070] Bacillus subtilis strain ELA191105, also denoted strain 105, corresponds to ATCC deposit PTA-126786. Strain 105 is described and detailed as a genetically modified strain for live delivery or production in U.S. Ser. No. 63/247,271 (filed Sep. 11, 2021), 63/247,273 (filed Sep. 22, 2021) and 63/247,400 (filed Sep. 23, 2021), which applications are incorporated herein by reference.

B. subtilis Strain 105 and Strain Combinations

[0071] B. subtilis strain 105 is described as a microbial having beneficial effects, including in combination with one or more Bacillus amyloliquefaciens strain. In some aspects/embodiments, the B. subtilis strain 105 can be combined with one or more isolated Bacillus amyloliquefaciens strain, particularly selected from ELA191024 (corresponding to ATCC deposit PTA-126784), ELA191006 (corresponding to ATCC deposit PTA-127065) and ELA202071 (corresponding to ATCC deposit PTA-127064). These probiotic strain combinations and compositions and methods thereof are described and provided in PCT/US2021/051973 filed Sep. 24, 2021, published as WO2022/067052 Mar. 31, 2022. Priority applications include 63/083,697 filed Sep. 25, 2020 and 63/241,369 filed Sep. 8, 2021. All of the foregoing applications are incorporated herein by reference in their entireties.

[0072] In an embodiment the Lactilactobacillus species only has one antimicrobial resistance gene. In an embodiment the Lactilactobacillus species does not have any identifiable antimicrobial resistance genes. In an embodiment, the Lactilactobacillus species only has one gene involved in biogenic amines and toxins. In an embodiment the Lactilactobacillus species does not have any identifiable genes involved in biogenic amines and toxins. In an embodiment the Lactilactobacillus species is sensitive to an antibiotic. In an embodiment the antibiotic comprises at least one of Ampicillin, Vancomycin, Gentamicin, Kanamycin, Streptomycin, Erythromycin, Clindamycin, Tetracycline, Chloramphenicol, or combinations thereof.

[0073] In an embodiment the probiotic composition is in the form of a liquid, dry powder, pellets, suspension, or a combination thereof. In an embodiment the composition comprises between about 1×10⁶ and 1×10⁹ CFU/g of the Lactilactobacillus species. In an embodiment the composition comprises at least about 1×10⁶, 1×10⁷ CFU/g, 1×10⁸ CFU/g, or 1×10⁹ CFU/g of the Lactilactobacillus species. In an embodiment the composition includes from about 1×10⁴ to about 1×10¹⁰ viable spores per gram dry weight of the Lactilactobacillus species. In an embodiment the probiotic composition further comprises a prebiotic. In an embodiment the composition further comprises inulin, vitamin D, vitamin C, zinc, N-acetyl-glucosamine, galactooligosaccharides (GOS), lactose, or combinations thereof. In an embodiment the at least one bacterial strain is isolated and inactivated. In an embodiment the at least one bacterial strain is not genetically engineered. In an embodiment the Lactilactobacillus species is obtained from Salmo salar. In one embodiment, the first and the second isolated Lactilactobacillus strain are isolated from salmon and in particular from the intestine of Salmo salar.

[0074] In an embodiment the probiotic composition or direct fed microbial of the disclosure is formulated as animal feed, feed additive, food ingredient, water additive, water-mixed additive, consumable solution, consumable spray additive, consumable solid, consumable gel, injection, or combinations thereof. In an embodiment the probiotic composition of the disclosure includes a carrier suitable for animal administration. In an embodiment probiotic composition of the disclosure includes at least one of the following: edible food grade material, mineral mixture, gelatin, cellulose, carbohydrate, starch, glycerin, water, rice hulls, glycol, molasses, calcium carbonate, whey, sucrose, dextrose, soybean oil, vegetable oil, sesame oil, and corn oil, and combinations thereof.

[0075] In an embodiment, a method for improving feed efficiency in a fish includes administering the probiotic composition or composition described herein,

[0076] In an embodiment, a method for improving disease resistance in a fish includes administering the probiotic composition or composition described herein.

[0077] In the method embodiments the fish may be a salmon. The fish may be an Atlantic salmon. In the method embodiments, the composition may improve humoral immune modulation, bacteriocin production, lymphocyte modulation, inhibit aquatic pathogens. The aquatic pathogen may be Aeromonas.

[0078] In an embodiment, when combined with prebiotics, the composition may form a synbiotic which improves humoral immune response and weight gain.

[0079] In an embodiment, the compositions described herein may be used in the manufacture of a probiotic for fish.

[0080] In an embodiment, a fish food product may comprise the composition described herein. The product may comprise about 3-8% w/w lyophilized bacteria. The product may comprise about 0.01-0.2% w/w spray dried spores. The food product may further comprise food-grade excipients. The food product may be in the form of pellets, powder, granules, or a combination thereof.

[0081] In an embodiment, Lactilactobacillus curvatus and Lactilactobacillus sakei are the only bacterial strains in the composition.

[0082] In one embodiment, the disclosure provides a method for reducing or inhibiting the colonization of an animal by a pathogenic bacterium. In one embodiment, the disclosure provides a method for reducing or inhibiting the colonization of the gut or gastrointestinal tract (GIT) of an animal by a pathogenic bacterium. The method includes administering to an animal an effective amount of a probiotic composition described above. In an embodiment, the probiotic composition comprises a non-natural and unique combination of Lactilactobacillus bacteria strains as disclosed herein.

[0083] In one embodiment, the disclosure provides a method of treating necrotic enteritis in poultry by administering to poultry a probiotic composition described above and herein.

[0084] In one embodiment, the disclosure provides a method of delivering a metabolite to the gut of an animal. The method includes administering to an animal a probiotic composition having a first isolated Lactilactobacillus curvatus strain and a second isolated Lactilactobacillus strain described above and herein. In an embodiment, the metabolite is secreted by the combination of a first isolated Lactilactobacillus curvatus strain and a second isolated Lactilactobacillus strain.

[0085] In an embodiment, the composition is formulated as animal feed, feed additive, food ingredient, water additive, water-mixed additive, consumable solution, consumable spray additive, consumable solid, consumable gel, injection, or combinations thereof. In one embodiment, the composition comprises animal feed.

[0086] In an embodiment of the composition or method of the disclosure, the animal administered the composition further exhibits at least one improved gut characteristic, as compared to an animal not administered the composition; wherein improved gut characteristics includes at least one of: decreasing pathogen-associated lesion formation in the gastrointestinal tract, increasing feed digestibility, increasing meat quality, modulating microbiome, improving short chain fatty acids, and increasing gut health (reducing permeability and inflammation). The animal administered the composition can be a fish, in particular Salmo samar.

[0087] In an embodiment, the animal is human, non-human, poultry (chicken, turkey), bird, cattle, swine, fish, cat, or dog. In an embodiment the animal is fish. In an embodiment, the fish is salmon.

[0088] In an embodiment, the animal is fish and wherein the fish administered the composition further exhibits at least one of: decreased feed conversion ratio, increased weight, increased lean body mass, decreased pathogen-associated lesion formation in the gastrointestinal tract, decreased colonization of pathogens, modulated microbiome, increased feed digestibility, and decreased mortality rate, as compared to fish not administered the composition. In an embodiment, the fish is salmon and wherein the salmon administered the composition further exhibits at least one of: decreased feed conversion ratio, increased weight, increased lean body mass, decreased pathogen-associated lesion formation in the gastrointestinal tract, decreased colonization of pathogens, modulated microbiome, increased feed digestibility, and decreased mortality rate, as compared to salmon not administered the composition.

[0089] In an embodiment, the feed conversion ratio is decreased by at least 1%, at least 5%, at least 6%, at least 7%, at least 8%, at least 9%, at least 10%, or at least 15%. In an embodiment, poultry weight is increased by at least 1%, at least 5%, at least 10%, at least 15%, at least 25%, or at least 50%. In an embodiment, pathogen-associated lesion formation in the gastrointestinal tract is decreased by at least 1%, at least 5%, at least 10%, at least 15%, at least 25%, or at least 50%. In an embodiment, mortality rate is decreased by at least 1%, at least 5%, at least 10%, at least 15%, at least 25%, or at least 50%.

[0090] In an embodiment, the administration comprises spray administration. In an embodiment, the administration comprises dry feed administration. In an embodiment, the administration comprises immersion, intranasal, intramammary, topical, or inhalation.

[0091] In an embodiment, the administration comprises administration of a vaccine. In an embodiment, the animal is administered a vaccine prior to the administration of the composition. In an embodiment, the animal is a fish and the fish is administered a vaccine prior to the administration of the composition. In an embodiment, the fish is salmon and the salmon is administered a vaccine prior to the administration of the composition. In an embodiment, the animal is administered a vaccine concurrently with the administration of the composition. In an embodiment, the animal is a fish and the fish is administered a vaccine concurrently with the administration of the composition.

[0092] In an embodiment, a composition is provided for use in therapy. In an embodiment, a composition is provided for use in improving animal health. In an embodiment, a composition is provided for use in reducing colonization of an animal by a pathogenic bacterium. In an embodiment, a composition is provided for use in the manufacture of a medicament for reducing colonization of an animal by a pathogenic bacterium.

[0093] In an embodiment, a method is provided reducing mortality in fish, wherein the method comprises administering a composition as provided herein to a fish in need thereof. In an embodiment, a method is provided reducing mortality in salmon, wherein the method comprises administering a composition as provided herein to a salmon in need thereof. In an embodiment, a method is provided for improving performance selected from average daily feed intake (ADFI), average daily gain (ADG) and feed conversion ratio (FCR) in salmon, wherein the method comprises administering a composition as provided herein to a salmon in need thereof.

[0094] In an embodiment, a method is provided of preparing a fermentation product comprising the steps of:
[0095] (a) obtaining at least any combination of the following bacterial strains:
[0096] a Lactilactobacillus strain comprising SEQ ID NO: 1, a Lactilactobacillus strain comprising SEQ ID NO: 3, a Lactilactobacillus strain comprising SEQ ID NO: 2 or a Lactilactobacillus strain comprising SEQ ID NO: 4, and combinations thereof;
[0097] (b) contacting the at least one strain of step (a) with cell growth media;
[0098] (c) incubating a combination of at least one strain of step (a) and cell growth media of step (b) at a temperature of about 37° C. for an incubation time of about 24 hours; and
[0099] (d) cooling the combination of step (c);
[0100] wherein the product of step (d) comprises the fermentation product.

[0101] In a further embodiment, a method is provided of preparing a fermentation product comprising obtaining at least two of the bacterial strains.

[0102] In an embodiment, the cell growth media comprises: 0.5 g casamino acids/L, 1% glucose, Disodium Phosphate (anhydrous) 6.78 g/L, Monopotassium Phosphate 3 g/L, Sodium Chloride 0.5 g/L, and Ammonium Chloride 1 g/L.

[0103] In an embodiment, the cell growth media comprises: Peptone 30 g/L; Sucrose 30 g/L; Yeast extract 8 g/L; KH2PO4 4 g/L; MgSO4 1.0 g/L; and MnSO4 25 mg/L.

[0104] While there have been described what are presently believed to be particular embodiments of the present disclosure, those skilled in the art will realize that other and further changes and modifications may be made thereto without departing from the spirit of the disclosure, and it is intended to claim all such modifications and changes as come within the true scope of the disclosure.

[0105] Other objects and advantages will become apparent to those skilled in the art from a review of the ensuing detailed description, which proceeds with reference to the following illustrative drawings, and the attendant claims.

### BRIEF DESCRIPTION OF THE DRAWINGS

[0106] The patent or application file contains at least one drawing executed in color. Copies of this patent or patent application publication with color drawing(s) will be provided by the Office upon request and payment of the necessary fee.

[0107] FIG. 1 depicts the phylogenetic relationship of L. curvatus, L. sakei and L. fuchuensis strains using 92 core genes. The phylogenetic relationship was explored using UBCG v3.0 and a maximum likelihood tree was inferred using GTR+CAT model. L. reuteri was used as an outgroup.

[0108] FIG. 2 depicts the pan-genome analyses for L. curvatus, L. sakei and L. fuchuensis strains as determined by Orthofinder. A. The pan-genome pie chart showing gene content from core and accessory genes. B. A heatmap showing gene presence (dark blue) or absence (light blue) in each of the 18 strains. The core-genome tree generated was compared with a matrix where the core and accessory genes were either present or absent.

[0109] FIG. 3 depicts the antimicrobial susceptibility of Bacillus and Lactilactobacillus strains. A. Bacillus spp. and B. Lactilactobacillus spp. probiotic candidates. Minimum inhibitory concentration (MIC) (μg/mL) values for each antibiotic tested of respective genus are shown. Nine medically important antibiotics at a concentration range of 0.06-32 g/ml were tested and the respective antimicrobial susceptibility cut-off concentrations required for genus are shown at the bottom of each panel. *NR=not required by EFSA.

[0110] FIG. 4 depicts the effect of probiotic supplementation on the weights of salmon following daily administration in feed for 45 days. A. Description of study groups, dose and probiotic candidates tested. Negative control product (NCP), Test Product (TP) groups, CFU/g feed, organisms in consortia, text color corresponds to isolate origin; black=Indiana, grey=Chile, yellow=Norway. B. Body weights for each group following daily administration of the respective probiotic candidates in feed for 45 days. Horizontal bar denotes mean. *P=0.0039 for NCP vs TP3, Student's t-test (n=70). C. Timeline of experimental events.

[0111] FIG. 5 depicts the principal component analysis of feature abundance changes across media additives compared to media controls. Each marker in the figure represents one of three replicates in the corresponding treatment (different colors). Numbers in parenthesis indicate the variance explained by each of the principal components. The histogram on the bottom represents the distribution of samples from each of the two strains along the first principal component.

[0112] FIG. 6 depicts the features showing at least 10-fold difference in abundance with different media additives compared to a control condition. A. The number of features with a higher than 10-fold increase or decrease in abundance in media supplemented with different additives compared to a glucose media control for strain PTA-17. Error bars represent the standard error of the mean across replicates (n=3). B. Like A, but for strain PTA-16. In both panels, additives are sorted according to the number of metabolites with increased abundance.

[0113] FIG. 7 depicts the two-component PCA for standardized feature abundances in PTA-17 and PTA-16. Each marker in the figure represents the mean of three replicates for each strain and growth condition. Abundance data for each feature was Z-score standardized before PCA analysis. Numbers in parenthesis indicate the variance explained by each of the principal components.

[0114] FIG. 8 depicts the MeSH terms in different categories associated with potential compounds produced by PTA-17 and PTA-16. MeSH terms associated via co-annotation in PubMed publications were classified based on the MeSH term ontology. Numbers for adenine and biotin were excluded.

[0115] FIG. 9 depicts the number of MeSH terms associated with possible metabolites produced by PTA-17 and PTA-16. MeSH terms were identified by their significant co-annotation with metabolites across PubMed articles. Black stars indicate metabolites associated with features enriched by feed additives in PTA-16 but not PTA-17, red stars indicate features enriched in LcELA100 but not LcELA093.

[0116] FIG. 10A provides a schematic overview of group allocation to tanks and replicates in a study of probiotics on Atlantic salmon (Salmo salar) and B depicts the study design for evaluating supplementation of probiotics on Atlantic salmon (Salmo salar) in the presence of Salmonid Rickettsial Syndrome (SRS). Negative Control is standard diet only; TP1 is B. amyloliquefaciens Strain A+B. subtilis Strain A+B. amyloliquefaciens Strain B+Standard diet; TP2 is B. velezensis Strain A+B. subtilis Strain B+B. subtilis Strain A+Standard diet; TP3 is L. curvatus ELA204100+L. sakei ELA204093+Standard diet; TP4 is L. curvatus ELA204100+L. sakei ELA204093+B. subtilis Strain A+Standard diet; TP5 is B. velezensis Strain A+B. subtilis Strain B+L. curvatus ELA204100+Standard diet.

[0117] FIGS. 11A and B depicts average group weights over time. A depicts average body weight (BW) in grams and B depicts average body weight vs normal or negative control (NCP). Negative Control is standard diet only; TP1 is B. amyloliquefaciens Strain A+B. subtilis Strain A+B. amyloliquefaciens Strain B+Standard diet; TP2 is B. velezensis Strain A+B. subtilis Strain B+B. subtilis Strain A+Standard diet; TP3 is L. curvatus ELA204100+L. sakei ELA204093+Standard diet; TP4 is L. curvatus ELA204100+L. sakei ELA204093+B. subtilis Strain A+Standard diet; TP5 is B. velezensis Strain A+B. subtilis Strain B+L. curvatus ELA204100+Standard diet.

[0118] FIG. 12A-D depicts average tank weights. (A) shows average body weight (BW) in grams at day 1, (B) shows average body weight (BW) in grams at day 18, (C) shows average body weight (BW) in grams at day 33 and (D) shows average body weight (BW) in grams at day 45. Negative Control (NCP) is standard diet only; TP1 is B. amyloliquefaciens Strain A+B. subtilis Strain A+B. amyloliquefaciens Strain B+Standard diet; TP2 is B. velezensis Strain A+B. subtilis Strain B+B. subtilis Strain A+Standard diet; TP3 is L. curvatus ELA204100+L. sakei ELA204093+Standard diet; TP4 is L. curvatus ELA204100+L. sakei ELA204093+B. subtilis Strain A+Standard diet; TP5 is B. velezensis Strain A+B. subtilis Strain B+L. curvatus ELA204100+Standard diet.

[0119] FIGS. 13A and B depicts all weights at the end of Phase 1 or at day 45. Negative Control (NCP) is standard diet only; TP1 is B. amyloliquefaciens Strain A+B. subtilis Strain A+B. amyloliquefaciens Strain B+Standard diet; TP2 is B. velezensis Strain A+B. subtilis Strain B+B. subtilis Strain A+Standard diet; TP3 is L. curvatus ELA204100+L. sakei ELA204093+Standard diet; TP4 is L. curvatus ELA204100+L. sakei ELA204093+B. subtilis Strain A+Standard diet; TP5 is B. velezensis Strain A+B. subtilis Strain B+L. curvatus ELA204100+Standard diet.

[0120] FIG. 14 provides a tabulation of top probiotic sample information. Each of Lactilactobacillus strain 93 (ELA204093), Lactilactobacillus strain 100 (ELA204100), Lactilactobacillus strain 388 (ELA214388) and Lactilactobacillus strain 391 (ELA214391) are shown.

[0121] FIG. 15A provides a schematic overview of group allocation to tanks and replicates in a study of Lactilactobacillus probiotics on Atlantic salmon (Salmo salar) and B depicts the study design for evaluating supplementation of probiotics on Atlantic salmon (Salmo salar) Negative Control is standard diet only; TP1 is L. curvatus ELA204100+L. curvatus ELA204093+Standard diet; TP2 is L. curvatus ELA214388+L. sakei ELA214391+Standard diet.

[0122] FIG. 16 shows the effect of probiotic supplementation on the weights of salmon following daily administration in feed for 75 days in saltwater. FIG. 16A provides a timeline of experimental events. FIG. 16B shows mean body weights±standard error for each group following daily administration of the respective probiotic candidates in feed for 75 days. P=0.041 for NCP-S vs TP1-S, ANOVA with Dunnett's test (n=64)

[0123] FIG. 17 shows cumulative mortality after a P. salmonis cohabitation challenge on test (TP1, TP2) and control fish (NCP).

[0124] FIG. 18: Cumulative mortality after a P. salmonis cohabitation challenge on test, control and shedder fish. Each colour corresponds to a given tank, with solid line displaying shedders and sotted line displaying test fish. Analysis of survival (performed on survival curves, not shown, denotes a significant differences between NCP and TP1 (p=0.01).

### DETAILED DESCRIPTION

[0125] In an embodiment, the disclosure provides for a composition that is a combination of two Lactilactobacillus strains, particularly two isolated Lactilactobacillus curvatus strains or an isolated Lactilactobacillus curvatus strain and an isolated Lactilactobacillus sakei strain, wherein the composition includes a carrier that is suitable for animal consumption or use.

[0126] Without wishing to be bound by theory, it is believed that the consortia of strains described above have a unique secretion profile that provides health benefits to an animal when they colonize the gastrointestinal tract of an animal. Furthermore, it is believed that the combination of a first isolated Lactilactobacillus curvatus strain and a second isolated Lactilactobacillus strain, as described above, provide a unique combined metabolite secretion profile that provides health benefits to an animal when they colonize the gastrointestinal tract of an animal.

[0127] Even further, it is believed that the combination of a first isolated and a second isolated Lactilactobacillus strain as described above and herein, provide a unique combined metabolite secretion profile that provides health benefits to an animal when they colonize the gastrointestinal tract of an animal.

[0128] As used herein and in the context of bacterial consortia, “unique metabolites” include metabolites that are secreted at least 1.5, at least 2 fold, at least 3 fold, at least 5 fold, or at least 10 fold greater as compared to secretion of the respective metabolite by the bacterial strain grown individually.

[0129] The composition may include or comprise live bacteria or bacterial spores, or a combination thereof.

[0130] In some embodiments, the composition does not include antibiotics. Exemplary antibiotics include tetracycline, bacitracin, tylosin, salinomycin, virginiamycin and bambermycin.

[0131] In some embodiments, the Lactilactobacillus strains of the present disclosure are not genetically engineered or genetically modified and do not contain heterologous genetic sequences.

[0132] The compositions described above may include a carrier suitable for animal consumption or use. Examples of suitable carriers include edible food grade material, mineral mixture, gelatin, cellulose, carbohydrate, starch, glycerin, water, glycol, molasses, corn oil, animal feed, such as cereals (barley, maize, oats, and the like), starches (tapioca and the like), oilseed cakes, and vegetable wastes. In some embodiments, the compositions include vitamins, minerals, trace elements, emulsifiers, aromatizing products, binders, colorants, odorants, thickening agents, and the like.

[0133] In some embodiments, the compositions include one or more biologically active molecule or therapeutic molecule. Examples of the aforementioned include ionophore; vaccine; antibiotic; antihelmintic; virucide; nematicide; amino acids such as methionine, glycine, and arginine; fish oil; krill oil; and enzymes.

[0134] In some embodiments, the compositions or combinations may additionally include one or more prebiotic. In some embodiments, the compositions may be administered along with or may be coadministered with one or more prebiotic. Prebiotics may include organic acids or non-digestible feed ingredients that are fermented in the lower gut and may serve to select for beneficial bacteria. Prebiotics may include mannan-oligosaccharides, fructo-oligosaccharides, galacto-oligosaccharides, chito-oligosaccharides, isomalto-oligosaccharides, pectic-oligosaccharides, xylo-oligosaccharides, and lactose-oligosaccharides.

[0135] The composition may be formulated as animal feed, feed additive, food ingredient, water additive, water-mixed additive, consumable solution, consumable spray additive, consumable solid, consumable gel, injection, or combinations thereof. The composition may be formulated and suitable for use as or in one or more of animal feed, feed additive, food ingredient, water additive, water-mixed additive, consumable solution, consumable spray additive, consumable solid, consumable gel, injection, or combinations thereof. The composition may be suitable and prepared for use as animal feed, feed additive, food ingredient, water additive, water-mixed additive, consumable solution, consumable spray additive, consumable solid, consumable gel, injection, or combinations thereof.

### Methods and Methods of Use

[0136] In some embodiments, the disclosure provides for the use of any of the compositions described above to improve a phenotypic trait of interest in an animal. As used herein, a probiotic is a composition that improves a phenotypic trait of interest in an animal.

[0137] In all embodiments of the disclosure, an animal may include a farmed animal or livestock or a domesticated animal. Livestock or farmed animal may include cattle (e.g. cows or bulls (including calves)), poultry (including broilers, chickens and turkeys), pigs (including piglets), birds, aquatic animals such as fish, agastric fish, gastric fish, freshwater fish such as salmon, cod, trout and carp, e.g. koi carp, marine fish such as sea bass, and crustaceans such as shrimps, mussels and scallops), horses (including race horses), sheep (including lambs). A domesticated animal may be a pet or an animal maintained in a zoological environment and may include any relevant animal including canines (e.g. dogs), felines (e.g. cats), rodents (e.g. guinea pigs, rats, mice), birds, fish (including freshwater fish and marine fish), and horses. The animal may be a pregnant or breeding animal.

[0138] Examples of improving a phenotypic trait includes decreasing pathogen-associated lesion formation in the gastrointestinal tract, decreasing colonization of pathogens, increasing feed digestibility, modulating microbiome, increasing short chain fatty acids, and increasing gut health or characteristic (reducing permeability and inflammation).

[0139] A pathogen may be a bacteria or a virus. The virus may include a pathogenic virus infecting animals, including livestock animals or domesticated animals and may be specific for a particular animal such as a fish virus or a salmon virus. The bacteria may include a pathogenic bacteria infecting animals, including fish and may be specific for a particular animal such as a fish bacteria or a salmon bacteria.

[0140] The compositions may be used to treat an infection particularly a bacterial infection. In some aspects, the compositions described above are used to treat an infection from at least one of Piscirikettsia salmonis and Tanacibaculum maritimum. The compositions may be used to inhibit infection, particularly a bacterial infection. Infection may be by one or more Piscirikettsia salmonis and Tanacibaculum maritimum.

[0141] In some aspects, the compositions described above are used to reduce colonization by or inhibit colonization by a bacteria in an animal, particularly in a herd or group of animals, particularly of pathogenic bacteria. In some aspects, the compositions described above are used to reduce colonization by or inhibit colonization of at least one of Piscirikettsia salmonis and Tanacibaculum maritimum.

[0142] In some aspects, the compositions described above are used to reduce transmission of bacteria, particularly pathogenic bacteria, in an animal pen or in a group or herd of animals. In some aspects, the compositions described above are used to reduce transmission in an animal pen or in a group or herd of animals of at least one of Piscirikettsia salmonis and Tanacibaculum maritimum.

[0143] In some aspects, the compositions described above are used to reduce bacterial load, particularly pathogenic bacteria or clinically significant bacteria, including the number or amount of bacteria in the gut or gastrointestinal tract of an animal.

[0144] In some aspects, the compositions described above are used to treat at least one of inflammatory bowel disease, obesity, liver abscess, ruminal acidosis, leaky gut syndrome, piglet diarrhea, necrotic enteritis, coccidiosis, salmon ricketsial septicemia, and foodborne diseases.

[0145] In one embodiment, examples of phenotypic traits of interest in animals include decreased feed conversion ratio, increased weight, increased lean body mass, decreased pathogen-associated lesion formation in the gastrointestinal tract, decreased colonization of pathogens, modulated microbiome, increased egg quality, increased feed digestibility, and decreased mortality rate, as compared to animals not administered the composition.

[0146] In one embodiment, examples of phenotypic traits of interest in poultry include decreased feed conversion ratio, increased weight, increased lean body mass, decreased pathogen-associated lesion formation in the gastrointestinal tract, decreased colonization of pathogens, modulated microbiome, increased egg quality, increased feed digestibility, and decreased mortality rate, as compared to poultry not administered the composition.

[0147] In one embodiment, examples of phenotypic traits of interest in swine include decreased feed conversion ratio, increased weight, increased lean body mass, decreased pathogen-associated lesion formation in the gastrointestinal tract, decreased colonization of pathogens, modulated microbiome, increased feed digestibility, prevention of or reduction of post-weaning diarrhea in piglets, reduction of fecal scores, increased piglet body weight or weight gain, reduced unconsumed feed, increased daily feed intake, improved weight gain to feed ratio and decreased mortality rate, as compared to swine not administered the composition.

[0148] Methods are provided herein for reduction of post-weaning diarrhea in an animal. Methods are provided herein for reduction of fecal scores in a herd or group or pen of animals. Methods are provided herein for increase in body weight, for weight gain, for reducing unconsumed feed, for increasing daily feed intake, or for improving weight gain to feed ratio in a animal or in a herd or group or pen of animals.

[0149] In some aspects, the animal administered an effective amount of the composition disclosed herein exhibits a decrease in the feed conversion ratio by at least 1%, at least 5%, at least 6%, at least 7%, at least 8%, at least 9%, at least 10%, or at least 15%. In some aspects, the poultry administered an effective amount of the composition disclosed herein exhibits a decrease in the feed conversion ratio by at least 1%, at least 5%, at least 6%, at least 7%, at least 8%, at least 9%, at least 10%, or at least 15%. In some aspects, the swine or pigs/piglets administered an effective amount of the composition disclosed herein exhibits a decrease in the feed conversion ratio by at least 1%, at least 5%, at least 6%, at least 7%, at least 8%, at least 9%, at least 10%, or at least 15%.

[0150] In some aspects, the animal administered an effective amount of the composition disclosed herein exhibits an increase in animal weight by at least 1%, at least 5%, at least 25%, 20% or at least 50%. In some aspects, the poultry administered an effective amount of the composition disclosed herein exhibits an increase in poultry weight by at least 1%, at least 5%, at least 25%, 20% or at least 50%. In some aspects, the swine or piglet administered an effective amount of the composition disclosed herein exhibits an increase in swine or piglet weight by at least 1%, at least 5%, at least 25%, 20% or at least 50%.

[0151] In some aspects, the animal administered an effective amount of the composition disclosed herein exhibits a decrease in pathogen-associated lesion formation in the gastrointestinal tract by at least 1%, at least 5%, at least 25%, or at least 50%. In some aspects, the poultry administered an effective amount of the composition disclosed herein exhibits a decrease in pathogen-associated lesion formation in the gastrointestinal tract by at least 1%, at least 5%, at least 25%, or at least 50%. In some aspects, the swine or piglet administered an effective amount of the composition disclosed herein exhibits a decrease in pathogen-associated lesion formation in the gastrointestinal tract by at least 1%, at least 5%, at least 25%, or at least 50%.

[0152] In some aspects, the animal administered an effective amount of the composition disclosed herein exhibits decrease in the mortality rate by at least 1%, at least 5%, at least 25%, or at least 50%. In some aspects, the poultry administered an effective amount of the composition disclosed herein exhibits decrease in the mortality rate by at least 1%, at least 5%, at least 25%, or at least 50%. In some aspects, the swine, piglet administered an effective amount of the composition disclosed herein exhibits decrease in the mortality rate by at least 1%, at least 5%, at least 25%, or at least 50%.

[0153] In some aspects, the poultry administered an effective amount of the composition exhibits an increase in production efficiency by at least 6.0%, by at least 7%, by at least 10%, or by at least 15%.

[0154] The compositions may further include one or more component or additive. The one or more component or additive may be a component or additive to facilitate administration, for example by way of a stabilizer or vehicle, or by way of an additive to enable administration to an animal such as by any suitable administrative means, including in aerosol or spray form, in water, in feed or in an injectable form. Administration to an animal may be by any known or standard technique. These include oral ingestion, gastric intubation, or broncho-nasal spraying. The compositions disclosed herein may be administered by immersion, intranasal, intramammary, topical, mucosally, or inhalation.

[0155] Compositions may include a carrier in which the bacterium or any such other components is suspended or dissolved. Such carrier(s) may be any solvent or solid or encapsulated in a material that is non-toxic to the inoculated animal and compatible with the organism. Suitable pharmaceutical carriers include liquid carriers, such as normal saline and other non-toxic salts at or near physiological concentrations, and solid carriers, such as talc or sucrose and which can also be incorporated into feed for farm animals. When used for administering via the bronchial tubes, the composition is presented in particular in the form of an aerosol. A dye may be added to the compositions hereof, including to facilitate chacking or confirming whether an animal has ingested or breathed in the composition.

[0156] When administering to animals, including farm animals, administration may include orally or by injection. Oral administration can include by bolus, tablet or paste, or as a powder or solution in feed or drinking water. The method of administration will often depend on the species being fed or administered, the numbers of animals being fed or administered, and other factors such as the handling facilities available and the risk of stress for the animal.

[0157] The dosages required will vary and need be an amount sufficient to induce an immune response or to effect a biological or phenotypic change or response expected or desired. Routine experimentation will establish the required amount. Increasing amounts or multiple dosages may be implemented and used as needed.

[0158] In an embodiment of the disclosure, the bacterial strains are administered in doses indicated as CFU/g or colony forming units of bacteria per gram. In an embodiment, the dose is in the range of 1×10³ to 1×10⁹ CFU/g. In an embodiment, the dose is in the range of 1×10³ to 1×10⁷. In an embodiment, the dose is in the range of 1×10⁴ to 1×10⁶. In an embodiment, the dose is in the range of 5×10⁴ to 1×10⁶. In an embodiment, the dose is in the range of 5×10⁴ to 6×10⁵. In an embodiment, the dose is in the range of 7×10⁴ to 3×10⁵. In an embodiment, the dose is approximately 50K, 75K, 100K, 125K, 150K, 200K, 300K, 400K, 500K, 600K CFU/g.

[0159] Administration of the compositions disclosed herein may include co-administration with a vaccine or therapeutic compound. Administration of the vaccine or therapeutic compound includes administration prior to, concurrently, or after the composition disclosed herein.

[0160] Suitable vaccines in accordance with this embodiment include a vaccine that aids in the prevention of coccidiosis.

[0161] In some embodiments, the methods described above are administered to an animal in the absence of antibiotics.

### Definitions

[0162] Unless defined otherwise, all technical and scientific terms used herein have the same meaning as those commonly understood by one of ordinary skill in the art to which this disclosure belongs.

[0163] As used in the description herein and throughout the claims that follow, the meaning of “a,” “an,” and “the” includes plural reference unless the context clearly dictates otherwise.

[0164] As used herein, “isolated” means that the subject isolate has been separated from at least one of the materials with which it is associated in a particular environment, for example, its natural environment.

[0165] Thus, an “isolate” does not exist in its naturally occurring environment; rather, it is through the various techniques known in the art that the microbe has been removed from its natural setting and placed into a non-naturally occurring state of existence. Thus, the isolated strain or isolated microbe may exist as, for example, a biologically pure culture in association with an acceptable carrier.

[0166] As used herein, “individual isolates” should be taken to mean a composition, or culture, comprising a predominance of a single species, or strain, of microorganism, following separation from one or more other microorganisms. The phrase should not be taken to indicate the extent to which the microorganism has been isolated or purified. However, “individual isolates” can include substantially only one species, or strain, of microorganism.

[0167] As used herein, the term “bacterial consortia”, “bacterial consortium”, “microbial consortia” or “microbial consortium” refers to a subset of a microbial community of individual microbial species, or strains of a species, which can be described as carrying out a common function, or can be described as participating in, or leading to, or correlating with, a recognizable parameter, such as a phenotypic trait of interest (e.g., increased feed efficiency in poultry). The community may comprise two or more species, or strains of a species, of microbes. In some instances, the microbes coexist within the community symbiotically.

[0168] As used herein, “spore” or “spores” refer to structures produced by bacteria that are adapted for survival and dispersal. Spores are generally characterized as dormant structures; however, spores are capable of differentiation through the process of germination. Germination is the differentiation of spores into vegetative cells that are capable of metabolic activity, growth, and reproduction. The germination of a single spore results in a single bacterial vegetative cell. Bacterial spores are structures for surviving conditions that may ordinarily be nonconducive to the survival or growth of vegetative cells.

[0169] As used herein, the terms “colonize” and “colonization” include “temporarily colonize” and “temporary colonization”.

[0170] As used herein, “microbiome” refers to the collection of microorganisms that inhabit the gastrointestinal tract of an animal and the microorganisms' physical environment (i.e., the microbiome has a biotic and physical component). The microbiome is fluid and may be modulated by numerous naturally occurring and artificial conditions (e.g., change in diet, disease, antimicrobial agents, influx of additional microorganisms, etc.). The modulation of the gastrointestinal microbiome can be achieved via administration of the compositions of the disclosure can take the form of: (a) increasing or decreasing a particular Family, Genus, Species, or functional grouping of a microbe (i.e., alteration of the biotic component of the gastrointestinal microbiome) and/or (b) increasing or decreasing gastrointestinal pH, increasing or decreasing volatile fatty acids in the gastrointestinal tract, increasing or decreasing any other physical parameter important for gastrointestinal health (i.e., alteration of the abiotic component of the gut microbiome).

[0171] As used herein, “probiotic” refers to a substantially pure microbe (i.e., a single isolate) or a mixture of desired microbes, and may also include any additional components (e.g., carrier) that can be administered to an animal to provide a beneficial health effect. Probiotics or microbial compositions of the disclosure may be administered with an agent or carrier to allow the microbes to survive the environment of the gastrointestinal tract, i.e., to resist low pH and to grow in the gastrointestinal environment.

[0172] The term “growth medium” as used herein, is any medium which is suitable to support growth of a microbe. By way of example, the media may be natural or artificial including gastrin supplemental agar, minimal media, rich media, LB media, blood serum, and tissue culture gels. It should be appreciated that the media may be used alone or in combination with one or more other media. It may also be used with or without the addition of exogenous nutrients.

[0173] As used herein, “improved” should be taken broadly to encompass improvement of a characteristic of interest, as compared to a control group, or as compared to a known average quantity associated with the characteristic in question. For example, “improved” feed efficiency associated with application of a beneficial microbe, or microbial ensemble, of the disclosure can be demonstrated by comparing the feed efficiency of poultry treated by the microbes taught herein to the feed efficiency of poultry not treated. In the present disclosure, “improved” does not necessarily demand that the data be statistically significant (i.e. p<0.05); rather, any quantifiable difference demonstrating that one value (e.g. the average treatment value) is different from another (e.g. the average control value) can rise to the level of “improved.”

[0174] As used herein, the term “metabolite” refers to an intermediate or product of metabolism. In some embodiments, a metabolite includes a small molecule. Metabolites have various functions, including in fuel, structural, signaling, stimulatory and inhibitory effects on enzymes, as a cofactor to an enzyme, in defense, and in interactions with other organisms (such as pigments, odorants and pheromones). A primary metabolite is directly involved in normal growth, development and reproduction. A secondary metabolite is not directly involved in these processes but usually has an important ecological function. Examples of metabolites include but are not limited to antibiotics and pigments such as resins and terpenes, etc. Metabolites, as used herein, include small, hydrophilic carbohydrates; large, hydrophobic lipids and complex natural compounds.

[0175] As used herein, “carrier”, “acceptable carrier”, or “pharmaceutical carrier” are used interchangeably and refer to a diluent, adjuvant, excipient, or vehicle with which the compound is administered. Such carriers can be sterile liquids, such as water and oils, including those of petroleum, animal, vegetable, or synthetic origin; such as peanut oil, soybean oil, mineral oil, sesame oil, and the like. Water or aqueous solution saline solutions and aqueous dextrose and glycerol solutions are employed in particular as carriers, in some embodiments as injectable solutions. Alternatively, the carrier can be a solid dosage form carrier, including but not limited to one or more of a binder (for compressed pills), a glidant, an encapsulating agent, a flavorant, and a colorant. The choice of carrier can be selected with regard to the intended route of administration and standard pharmaceutical practice. See Handbook of Pharmaceutical Excipients, (Sheskey, Cook, and Cable) 2017, 8th edition, Pharmaceutical Press; Remington's Pharmaceutical Sciences, (Remington and Gennaro) 1990, 18th edition, Mack Publishing Company; Development and Formulation of Veterinary Dosage Forms (Hardee and Baggot), 1998, 2nd edition, CRC Press.

[0176] As used herein, “delivery” or “administration” means the act of providing a beneficial activity to a host. The delivery may be direct or indirect. An administration could be by an oral, nasal, or mucosal route. For example without limitation, an oral route may be an administration through drinking water, a nasal route of administration may be through a spray or vapor, and a mucosal route of administration may be through direct contact with mucosal tissue. Mucosal tissue is a membrane rich in mucous glands such as those that line the inside surface of the nose, mouth, esophagus, trachea, lungs, stomach, gut, intestines, and anus. In the case of birds, administration may be in ovo, i.e. administration to a fertilized egg. In ovo administration can be via a liquid which is sprayed onto the egg shell surface, or an injected through the shell.

[0177] As used herein, the terms “treating”, “to treat”, or “treatment”, include restraining, slowing, stopping, inhibiting, reducing, ameliorating, or reversing the progression or severity of an existing symptom, disorder, condition, or disease. A treatment may also be applied prophylactically to prevent or reduce the incidence, occurrence, risk, or severity of a clinical symptom, disorder, condition, or disease.

[0178] As used herein, “animal” includes bird, poultry, a human, or a non-human mammal. Specific examples include chickens, turkey, dogs, cats, cattle, salmon, fish, swine and horse. The chicken may be a broiler chicken, egg-laying, or egg-producing chicken. As used herein, the term “poultry” includes domestic fowl, such as chickens, turkeys, ducks, and geese.

[0179] As used herein, “gut” refers to the gastrointestinal tract including stomach, small intestine, and large intestine. The term “gut” may be used interchangeably with “gastrointestinal tract”.

[0180] As used herein Lactobacillus and Lactilactobacillus are used interchangeably, the latter being the more modern term.

[0181] Any examples or illustrations given herein are not to be regarded in any way as restrictions on, limits to, or express definitions of any term or terms with which they are utilized. Instead, these examples or illustrations are to be regarded as being described with respect to one particular embodiment and as being illustrative only. Those of ordinary skill in the art will appreciate that any term or terms with which these examples or illustrations are utilized will encompass other embodiments which may or may not be given therewith or elsewhere in the specification and all such embodiments are intended to be included within the scope of that term or terms. Language designating such nonlimiting examples and illustrations includes, but is not limited to: “for example,” “for instance,” “e.g.,” and “in one embodiment.” In this specification, groups of various parameters containing multiple members are described. Within a group of parameters, each member may be combined with any one or more of the other members to make additional sub-groups. For example, if the members of a group are a, b, c, d, and e, additional sub-groups specifically contemplated include any one, two, three, or four of the members, e.g., a and c; a, d, and e; b, c, d, and e; etc.

[0182] Throughout this specification, quantities are defined by ranges, and by lower and upper boundaries of ranges. Each lower boundary can be combined with each upper boundary to define a range. The lower and upper boundaries should each be taken as a separate element. Two lower boundaries or two upper boundaries may be combined to define a range.

### DEPOSIT INFORMATION

[0183] Lactilactobacillus curvatus strain “ELA204093” was deposited on Aug. 31, 2021 according to the Budapest Treaty in the American Type Culture Collection (ATCC), ATCC Patent Depository, 10801 University Boulevard, Manassas, Va., 20110, USA. The deposit has been assigned ATCC Patent Deposit Number PTA-127116.

[0184] Lactilactobacillus curvatus strain “ELA204100” was deposited on Aug. 31, 2021 according to the Budapest Treaty in the American Type Culture Collection (ATCC), ATCC Patent Depository, 10801 University Boulevard, Manassas, Va., 20110, USA. The deposit has been assigned ATCC Patent Deposit Number PTA-127117.

[0185] Lactilactobacillus curvatus strain “ELA214388” was deposited on Aug. 31, 2021 according to the Budapest Treaty in the American Type Culture Collection (ATCC), ATCC Patent Depository, 10801 University Boulevard, Manassas, Va., 20110, USA. The deposit has been assigned ATCC Patent Deposit Number PTA-127118.

[0186] Lactilactobacillus sakei strain “ELA214391” was deposited on Aug. 31, 2021 according to the Budapest Treaty in the American Type Culture Collection (ATCC), ATCC Patent Depository, 10801 University Boulevard, Manassas, Va., 20110, USA. The deposit has been assigned ATCC Patent Deposit Number PTA-127119.

[0187] Access to the deposits will be available during the pendency of this application to persons determined by the Commissioner of Patents and Trademarks to be entitled thereto under 37 C.F.R. § 1.14 and 35 U.S.C. § 122. Upon allowance of any embodiments in this application, all restrictions on the availability to the public of the variety will be irrevocably removed.

[0188] The deposits will be maintained in the ATCC depository, which is a public depository, for a period of 30 years, or 5 years after the most recent request, or for the effective life of the patent, whichever is longer, and will be replaced if a deposit becomes nonviable during that period.

[0189] The present disclosure may be better understood with reference to the examples, set forth below. The following examples are put forth so as to provide those of ordinary skill in the art with a complete disclosure and description of how the compounds, compositions, and/or methods claimed herein are made and evaluated, and are intended to be purely exemplary and are not intended to limit the disclosure. It will be appreciated that other embodiments and uses will be apparent to those skilled in the art and that the invention is not limited to these specific illustrative examples or specific embodiments.

### Aquaculture Probiotic Compositions

[0190] Salmon is a valuable protein source worldwide; since 2016, it has been the second-most popular seafood consumed in the United States. Salmon farming is critical to fill this demand as aquaculture provides 70% of global salmon production. Atlantic salmon are attractive to farmers as prices and profit margins are high due to strong demand, and require significantly less fresh water, space, and feed to produce the same mass of protein than terrestrial agriculture. The bulk of the salmon production cycle takes place in non-potable saltwater. Atlantic salmon meat is also attractive to consumers for its nutritional value including omega-3 fatty acids. However, the Atlantic salmon production cycle is relatively long at three years, which can make salmon farming capital-intensive and volatile. In an effort to improve feed efficiency, plant and insect proteins have been integrated into salmon feed. This can result in gut inflammation and poor weight gain due to antinutrients and changes in the fatty acid profile of salmon meat, specifically decreasing desirable omega-3 long-chain fatty acids. Intensive salmon farming can also be plagued by losses from disease like sea lice.

[0191] Lactobacilli are among the most widely used probiotic genus in human food and dietary supplements and are increasingly used as feed additives in aquaculture. Probiotics native to the target species, instead of species from a different environment may be better adapted to the aquatic environment and offer superior benefits to salmon. The inventors isolated and identified 900 native microbial isolates including 18 Lactobacilli from farmed salmon intestines.

[0192] Based on whole-genome sequencing and phylogenetic analysis, the Lactobacillus candidates belonged to Lactilactobacillus curvatus (L. curvatus) species and formed two distinct phylogenetic groups.

[0193] Using bioinformatics and in vitro analyses, two Lactilactobacillus strains were selected, L. curvatus ATCC PTA-127116 and L. curvatus ATCC PTA-127117, which showed desirable safety and probiotic properties. The two L. curvatus strains were evaluated for safety and efficacy in Atlantic salmon alongside spore-forming Bacilli isolated from salmon, poultry, and swine. All of the tested strains were safe to salmon with no adverse effects. While the inventors did not observe any efficacy in any Bacillus supplemented groups, the group administered with the two L. curvatus strains consortium in feed for seven weeks showed surprisingly significant improvement by 4.2% in final body weight compared to untreated group.

[0194] Comprehensive metabolomics analyses of the two strains in the presence of different prebiotics and/or additives revealed distinct metabolite profiles for each strain and prebiotic and/or additive with galactooligosaccharide-zinc-vitamin D3 combination resulting in most metabolic changes.

[0195] The two endogenous L. curvatus strains were identified for use in probiotic compositions and methods of use for Atlantic salmon. The two Lactilactobacillus curvatus (L. curvatus) strains may be used in combination, or individually, in probiotic compositions, optionally including prebiotics and/or additives to enhance their efficacy. Probiotics may be used to improve salmon weight gain and disease resistance, major challenges in aquaculture.

[0196] Lactobacillus, first bacteriologically described in 1901, is a popular probiotic candidate genus of lactic acid bacteria with a long history of safe use, and many studies have shown their efficacy in modulating terrestrial host immune systems. They dominate the intestine of healthy fish and favorably modulate fish gut microbiome. Lactobacilli improve fish disease resistance via immunostimulation. This effect likely stems from a combination of mechanisms such as humoral immune modulation, bacteriocin production, and lymphocyte modulation. Lactic acid bacteria can directly inhibit aquatic pathogens like Aeromonas, and when combined with prebiotics, form a synbiotic which can also improve humoral immune response and weight gain.

[0197] Various terrestrial and aquatic sources can yield probiotics for use in aquaculture, including cheese, humans, dairy, crops and soil, as well as recirculating aquaculture systems (RAS) and native fish specimens. Native microbiome species are already adapted to the temperature, pH, osmotic pressure, and native antimicrobial activity seen in aquaculture. While terrestrial probiotic candidates may be able to survive under these conditions, native species may already be optimized to conferring probiotic benefits, and colonization and positive effects may last longer.

[0198] The disclosure screened, identified, and analyzed native Lactilactobacillus candidates, recently differentiated within Lactobacillus for probiotic use in salmon. The study included whole genome sequencing feature analysis, as well as extensive metabolomics analysis in the presence of several prebiotic candidates toward the design of a synbiotic. It was surprisingly discovered that the combination of the Lactilactobacillus strains produced a synergistic effect, significant improvement in salmon growth performance.

[0199] The disclosure is now described by Examples which should not be used to unduly limit the disclosure to particular features or embodiments.

### EXAMPLES

### Example 1

### Identification of Probiotics

### Probiotic Candidate Isolation

[0200] Probiotic candidates were isolated from healthy salmon samples received from Chile, Norway, and North America over a seven-month period. On each site, selected stock fish were humanely euthanized according to the farm's standard husbandry procedures, e.g., overdose of an approved fish anesthetic, before packaging whole or processing for tissues prior to cold chain shipment.

[0201] On site or upon receipt, fish whole gut was excised, and the samples were separated aseptically into foregut and hindgut. Each sample was homogenized completely by hand in Whirl-Paks (Whirl-Pak; Madison, WI) in De Man Rogosa and Sharpe broth (MRS) (Becton Dickinson (BD); Franklin Lakes, NJ). Aliquots were heat-treated at 100° C. at 15° C. for 10 minutes to select for spore formers, targeting Bacillus spp. Dilutions were prepared to 10⁻² in PBS (Gibco Thermo Fisher; Hampton, NH) and 0.1 mL of each dilution was spread over the surface of plates of MRS agar (BD) supplemented with amphotericin B (Thermo Fisher) for lactic acid bacteria, and LB agar (BD) for Bacillus species. LB plates were incubated aerobically at 15° C. for three days, and MRS Plates were incubated at 15° C. or 23° C. under microaerophilic conditions in a GasPak EZ Campy Container system (BD) for 4 days before colonies were picked and re-isolated on fresh medium three times (Table 2).

TABLE 2
List of media conditions used in the study.

| Study | Condition | | |
|---|---|---|---|
| identifier | name | Role | Description |
| GLC | Glucose | Carbon source | Glucose |
| MALT | Maltose | Carbon source | Maltose |
| LAC | Lactose | Carbon source | Lactose |
| FUC | Fucose | Carbon source | Fucose |
| NAG | NAG | Simulant of | N-acetyl-glucosamine |
| | | fungal | |
| | | coculture | |
| BS | Bile Salt | Microbiome | Bile-salts |
| | | metabolites | |
| GOS | GOS | Prebiotic, | Galactooligosaccharide |
| | | carbon source | |
| IN | Inulin | Prebiotic, | Inulin (from chicory) |
| | | carbon source | |
| GOSC | GOS + vitC | Prebiotic, | Galactooligosaccharide |
| | | carbon source | and vitamin C |
| GOSD | GOS + vitD3 | Prebiotic, | Galactooligosaccharide |
| | | carbon source | and vitamin D3 |
| GOSZ | GOS + Zn | Prebiotic, | Galactooligosaccharide |
| | | carbon source | and zinc |
| GOSCMB | GOS combo | Prebiotic, | Galactooligosaccharide |
| | | carbon source | vitamin D3, |
| | | | and zinc |

[0202] Lactic acid bacteria were passaged under both aerobic and microaerophilic conditions at 15° C. and 23° C. Three of the candidates used in salmon studies were Bacillus isolated in the same way from chicken cecum and swine intestine described previously. Susanti et al. Front Microbiol. (2021) 12:747845; Latorre et al. Front Vet. Sci. (2016) 3:95.

### Bacterial Identification

[0203] Probiotic candidate strains were identified using 16S rRNA sequencing. Briefly, lactic acid bacterial strains were grown on Lactobacilli MRS agar for 36-48 hours under microaerobic conditions at 25° C. using BD GasPak container and sachets (BD). Bacillus strains were grown on LB agar for 36-48 hours under aerobic conditions at 25° C. Patched colonies were resuspended in 50 p. L of nuclease-free water and heated at 100° C. for 10 minutes. The debris were pelleted by brief centrifugation and the supernatant was used as a template for PCR. Sanger sequencing was sent to TacGen for analysis (TacGen; Richmond, CA) using U16Sf 5′-AGAGTTTGATCCTGGCTCAG-3′ (SEQ ID NO: 20) and U16Sr R, 5′-CTTGTGCGGGCCCCCGTCAATTC-3′ (SEQ ID NOL 21).

[0204] The sequences were then searched against the NCBI nucleotide collection (nr/nt) database using the BLAST algorithm. Altschul et al. J. Mol. Biol. (1990) 215 (3): 403-10.

[0205] Selected isolates were identified with colony PCR using universal bacterial primer U16Sf and U16Sr in a 25 μL master mix consisting of 12.5 μL NEB Phusion master mix (NEB) and 2.5 L 10 UM primer mix. These PCR products were submitted to an outside partner (ACGT; Wheeling, IL) for sequencing using U16Sr, and identified using BLAST analysis against NCBI 16S rRNA species database. Altschul et al. J. Mol. Biol. (1990) 215 (3): 403-10.

### Antimicrobial Susceptibility Profiling

[0206] Candidates were sent to Microbial Research Inc. (Fort Collins, CO) for antimicrobial susceptibility analysis, performed as previously described (Susanti et al. Front Microbiol. (2021) 12:747845; Latorre et al. Front Vet. Sci. (2016) 3:95) for Bacillus. Lactobacillus was also analyzed at Microbial Research Inc. using broth microdilution method in laked horse blood (LHB) medium [Mueller Hinton broth (BD) containing 5% horse blood] following Clinical and Laboratory Standards Institute (CLSI) guidelines. Two-fold dilutions of the clinically relevant antibiotics (Clindamycin, Chloramphenicol, Erythromycin, Gentamicin, Kanamycin, Streptomycin, Tetracycline and Ampicillin; Sigma Aldrich; St. Louis, MO) were prepared in LHB medium. Approximately 50 μL of 1×10⁵ CFUs/mL of the Lactobacillus cells were added into each well. “No antibiotic” and “medium” alone controls were included. Escherichia coli ATCC 25923, Pseudomonas aeruginosa ATCC 27853, Staphylococcus aureus ATCC 29213, Enterococcus faecalis ATCC 29212, and Streptococcus pneumonia ATCC 49619 were used as quality control organisms. The Lactobacillus plates were incubated for 24-48 hours under microaerophilic conditions and Bacillus plates were incubated aerobically. Minimum inhibitory concentration (MIC) was defined as the lowest concentration of antibiotic that showed complete inhibition of candidate growth. The strains were classified as susceptible or resistant using the microbiological cut offs established by EFSA. Rychen et al. EFSA Journal (2018) 16 (4): e05206.

### Example 2

### Isolation of Genomic DNA

[0207] Genomic DNA for Illumina sequencing was isolated using the DNeasy blood and tissue kit (Qiagen; Hilden, Germany) for Gram-positive bacteria. Briefly, Lactilactobacillus strains were grown in MRS broth overnight under aerobic conditions for 14-16 hours without shaking. The cells were pelleted by centrifugation at 4,000×g for 10 minutes at 4° C. The pellet was washed once in 1 ml of PBS buffer (Invitrogen) and resuspended in 0.2 mL P1 buffer containing 100 μg/ml. RNase (Qiagen) and 6.25 mg/ml of lysozyme (Sigma Aldrich) and incubated at 37° C. overnight. After incubation, 20 μL of proteinase K (Qiagen) was added, mixed several times, and incubated at 55° C. for 1 hour. Subsequently DNA was purified without modification to the supplier protocol until elution in 100 μL distilled H₂O. Isolated DNA quantity was analyzed using Qubit 3.0 (Invitrogen) and integrity was confirmed by agarose gel electrophoresis.

### Whole Genome Sequencing (WGS)

[0208] Lactilactobacillus (see Table 1 above) whole genome sequencing (WGS) was performed using the Illumina platform.

[0209] Library preparations were performed according to the manufacturer's instructions for the Nextera DNA Flex Library Prep kit (Illumina; San Diego, CA). The concentration of DNA was confirmed using HS DNA Assay kit with the Qubit 3.0 (Invitrogen) and 300 ng of genomicDNA underwent the tagmentation process by enzymatic fragmentation, then sequence-specific overhangs attached using Bead-Linked Transposome technology. Following tagmentation, the samples were amplified with 5 cycles of PCR, using index labelled primers specific to the inserted sequences. Fragments were separated by size exclusion using SPRI-beads to obtain fragment sizes of about 600 base pairs. The eluted libraries were then confirmed for size and quality using the 4200 TapeStation High Sensitivity D1000 reagents (Agilent Technologies; Santa Clara, CA) and concentrations determined using Qubit HS DNA Assay (Invitrogen). Each library was diluted to a 4 nM stock and 5 μL of each library combined into a pooled library. The pooled library was then denatured by incubating with 0.2 N NaOH at room temperature for 5 minutes and diluted to a final concentration of 12 pM. The diluted pooled libraries were then added to the reagent cartridge (MiSeq Reagent Kit v3, Illumina) and analyzed using the MiSeq.

[0210] The genomes of L. curvatus strains PTA-127116 and PTA-127117, referred to herein as as PTA-16 and PTA-17 were further sequenced using PacBio platform. Bacterial pellet samples (Table 3) were sent to DNA Link, Inc (San Diego, CA) for WGS using PacBio RSII platform (PacBio; Menlo Park, CA).

TABLE 3
List of strains analyzed in the study.

| Study | | | | Source |
|---|---|---|---|---|
| identifier | Name | Genus | Species | organism |
| PTA-16 | L. curvatus ATCC | Lactilacto- | Curvatus | Atlantic |
| | PTA-127116 | bacillus | | salmon |
| PTA-17 | L. curvatus ATCC | Lactilacto- | Curvatus | Atlantic |
| | PTA-127117 | bacillus | | salmon |

[0211] The L. curvatus species listed in Table 3 were deposited in the American Type Culture Collection, located at 10801 University Boulevard, Manassas, Va., 20110-2209, USA.

[0212] Briefly, 20 kb DNA fragments were generated by shearing genomic DNA using the Covaris G-tube according to the manufacturer's recommended protocol (Covaris; Woburn, MA). Smaller fragments were purified by the AMpureXP bead purification system (Beckman Coulter; Brea, CA), For library preparation, 5 μg of genomic DNA was used. The SMRTbell library was constructed using SMRTbell™ Template Prep Kit 1.0 (PacBio®). Small fragments were removed using the BluePippin Size selection system (Sage Science; Beverly, MA). The remaining DNA sample was used for large-insert library preparation. A sequencing primer was annealed to the SMRTbell template and DNA polymerase was bound to the complex using DNA/Polymerase Binding kit P6 (PacBio®). Following the polymerase binding reaction, the MagBead was bound to the library complex with MagBeads Kit (PacBio®). This polymerase-SMRTbell-adaptor complex was loaded into zero-mode waveguides. The SMRTbell library was sequenced by 2 PacBio® SMRT cells (PacBio®) using the DNA sequencing kit 4.0 with C4 chemistry (PacBio®). A 1×240-minute movie was captured for each SMRT cell using the PacBio® RS sequencing platform. The genome was further assembled by DNA link, Inc with HGAP.3 protocol.

### Assembly of Illumina Sequence Data

[0213] Low quality reads trimming, and adaptor removal was performed using Trimmomatic software version 0.39. Bolger et al. Bioinformatics (2014) 30 (15): 2114-20. Paired end reads for 18 Lactobacillus samples were filtered using leading, trailing window of 20 and sliding window of 5 with average quality score of 20 to retain high quality reads. High-quality reads were used for de novo genome assembly with Unicycler (Wick et al. PLoS Comput Biol. (2017) 13 (6): e1005595) using the default assembly method. Scaffolds were filtered for a minimum of 200-bp read length. The quality of the subsequent assemblies was assessed by mapping the reads to assembly using bwa. Li H. Aligning sequence reads, clone sequences and assembly contigs with BWA-MEM. arXiv pre-print server. 2013. Genome completeness was found to be 99.46% for all the strains, using the CheckM lineage. Parks et al. Genome Res. (2015) 25 (7): 1043-55 Genome annotation, and feature prediction

[0214] Genome annotation was carried out using NCBI prokaryotic genome annotation pipeline, Prokaryotic Genome Annotation Pipeline (PGAP) that combines alignment based methods with methods of predicting protein-coding and RNA genes and other functional elements directly from sequence. Tatusova et al. Nucleic Acids Res. (2016) 44 (14): 6614-24. The biosynthetic gene clusters for secondary metabolites were determined using Antismash 5.0. Blin et al. Nucleic Acids Res. (2019) 47 (W1): W81-W7.

### Data Deposition

[0215] The raw sequencing reads, genome assemblies and annotations in this study were deposited in the NCBI BioProject following genome and bioproject accession numbers (Table 1 above).

### Example 3 Phylogenetic

### Analyses

[0216] Phylogenetic relationships of the genomes were explored with UBCG v3.0 using default settings. Na et al. J Microbiol. (2018) 56 (4): 280-5. This software tool employs a set of 92 single-copy core genes commonly present in all bacterial genomes. These genes then were aligned and concatenated within UBCG using default parameters. The estimation of robustness of the nodes is done through the gene support index (GSI), defined as the number of individual gene trees, out of the total genes used, that present the same node. A maximum-likelihood phylogenetic tree was inferred using FastTree v.2.1.10 with the GTR+CAT model. Price et al. PLoS One (2010) 5 (3): e9490.

### Identification of Prophages, Transposases and Other Insertion Sequences (IS)

[0217] Insertion sequence prediction was done using ISEscan v.1.7.2.1 (48). Prophage prediction was done using PhiSpy v4.2.6 which combines similarity- and composition-based strategies. Akhter et al. Nucleic Acids Res. (2012) 40 (16): e126.

### Example 4

### Probiotic and Treated Feed Preparation

[0218] Lactilactobacillus spp. were cultured for in vivo testing in BioStat B-DCU fermenters (Sartorius; Göttingen Germany) using MRS broth (BD). Cultures were dried in LyoStar 3 lyophilizer (SP; Warminster, PA), then lyophilized cake was powdered using mortar and pestle. Bacillus spp. were cultured from single colonies in sporulation medium ([8 g Bacto nutrient broth, 1 g KCl, 0.12 g MgSO₄·7H₂O, 5 g dextrose]/L adjusted to pH 7.6 with NaOH, with 0.1% each 1 M CaCl₂), 0.01 M MnSO₄, and 1 mM FeSO₄) for 96 hours, then washed and resuspended in cold PBS (Invitrogen). Maltodextrin solution was added for a final concentration of 15%, and spores were spray dried in a Buchi mini spray dryer (Buchi, Flawil, Switzerland) at an outlet temperature of 104° C. Dried spores with maltodextrin were mixed with 1.5% calcium phosphate as a desiccant.

[0219] Five groups were tested in the improvement of growth performance. 10 kg commercial extruded feed pellets were top coated with 750 g IVP. This IVP was prepared based on colony forming units (CFU) from 3-8% lyophilized bacteria or 0.01-0.2% spray dried spores, 91-99% food-grade excipients. Feed was coated first with IVP, then with 1% fish oil, then mixed for one additional minute. This process was repeated on larger feed pellets when fish reached 60 g. After final drying pellets were stored in plastic bags at 15° C.

### Performance Study

[0220] A 7-week study was performed. 600 Atlantic salmon parr weighing 30-50 g were recruited from internal populations, distributed without intentional bias in twelve 100 L study tanks randomly allocated to 6 groups with 2 replicate tanks for each group, and acclimatized to the conditions of the feeding trial and fed with a basal diet for seven days without handling. The control group (NCP) was fed commercial extruded basal diet and the probiotic group was given 75 mg/kg probiotic IVP corresponding to 2.23×10⁶-16×10⁸ CFUs/gram of feed. Feed caliber was adjusted according to biweekly sample weights. Fish were fed approximately 110% of the specific feed rate (SFR) using a Skretting feed table. Over the study period, fish were maintained in 100 L tanks of flow through fresh water under a photoperiod regime of 24-hour day light. Water flow during the holding period and during experimental period was set at a rate to ensure a minimum of 2.0 total volume water exchange/hour.

[0221] Supplemental oxygen was delivered as needed to the tank water to maintain appropriate saturated oxygen levels (70-130% saturation) and water temperature for all tanks was monitored daily.

### Global Untargeted Metabolomic Analysis

[0222] Study design: Two different probiotic strains of Lactilactobacillus were selected for this analysis and sent to MicroMGx (Chicago, IL) for analysis. Twelve different culture conditions were selected to influence the growth and metabolism of the Lactilactobacillus strains. The selected media additives are listed in Table 4, with concentrations listed.

TABLE 4
Media additive concentrations used in the study.

| Additive | Concentration | |
|---|---|---|
| Glucose | 111 | mM |
| Maltose | 58.5 | mM |
| Lactose | 58.5 | mM |
| L-fucose | 30 | mM |
| N-acetylglucosamine | 20 | mM |
| Inulin | 0.5% | w/v |
| Galactooligosaccharide | 0.5% | w/v |
| Galactooligosaccharide + zinc | 0.5 | mM |
| Galactooligosaccharide + vitamin d3 | 0.021 | mM |
| Galactooligosaccharide + ascorbic acid | 2.84 | mM |

| | |
|---|---|
| Galactooligosaccharide + zinc + vitamin | Above |
| d3 + ascorbic acid | concentrations |
| Bile salts | 0.3% |

[0223] To ensure statistical power, 3 biological replicates of each sample were analyzed. The total number of samples was 12 culture conditions×2 different strains×3 biological replicates=72 total samples. Additionally, each of the culture media were extracted and analyzed to enable the identification and removal of background signals. Samples were analyzed in random sequence to manage batch effects.

### Sample Preparation

[0224] Cultures of each of the Lactilactobacillus strains were grown overnight in MRS (BD) broth. Overnight cultures were then used to inoculate modified MRS broth (animal-origin peptones were replaced with vegetable proteose peptone; Sigma-Aldrich #29185) containing additives listed in the Table 4. Cultures were grown anaerobically for 72 hours. The cells and culture supernatant were separated by centrifugation 5 min at 16,000×g. Culture supernatant was extracted using Oasis HLB solid phase extraction cartridges (Waters; Milford, MA) and then dried down in a vacuum centrifuge for later use.

### Metabolomics Data Acquisition

[0225] Samples were analyzed on a Q-Exactive mass-spectrometer (Thermo Fisher) coupled to an Agilent 1200-series UHPLC.

### Identification of Metabolite Features

[0226] Metabolite features are defined as a specific m/z signal associated with a specific retention time. The features shown in this report were determined to be significant because they showed a change in abundance across media conditions of greater than two-fold, with a significance between groups (one-way ANOVA, *P<0.05). Where possible, metabolite features are assigned putative identifications by searching their observed accurate mass against a database of small molecules that are produced by bacteria.

### Lactilactobacillus Isolation and Molecular Identification

[0227] Of the 900 microbiome isolates cultured from Atlantic salmon intestine, 18 Lactilactobacillus isolates were cultured from Norwegian and North American salmon. Eight Lactilactobacillus strains including two strains described in the WGS and metabolomics portions of this study were isolated from the intestine of Atlantic salmon received from Norway. One Lactilactobacillus strain was isolated from hindgut and nine Lactilactobacillus strains were isolated from foregut of grower salmon from facilities in North America. 17 spore-forming Bacillus strains were isolated from the intestine of Atlantic salmon parr from a hatchery in Chile (Table 5).

TABLE 5
Description of probiotic library, Bacillus and Lactilactobacillus candidates.

| | | | | Bacillus | | Lactilactobacillus |
|---|---|---|---|---|---|---|
| Geographic | | Total | | listed | | listed |
| Source | Sample type | isolates | Bacillus | in QPS | Lactilactobacillus | in QPS |
| Norway | Parr and | 268 | 0 | 0 | 8 | 8 |
| | grower | | | | | |
| | intestine | | | | | |
| North | Grower | 394 | 0 | 0 | 10 | 10 |
| America | intestine | | | | | |
| Chile | Parr intestine | 238 | 17 | 6 | 0 | 0 |

[0228] Six of these Bacilli, and all of the Lactilactobacilli are listed in EFSA's qualified presumption of safety (QPS) list, suggesting they may be considered safe for probiotic use. Koutsoumanis et al. EFSA Journal (2020) 18 (2). Three of the Bacillus strains showed closest homology to B. velezensis, three showed closest homology to B. subtilis, identified by 16S sequencing and BLAST analyses (Table 6).

[0229] Based on the WGS and respective BLAST search comparison results, three Lactilactobacillus strains showed closest homology to L. sakei, and 15 of the strains, including PTA-16 and PTA-17, showed closest homology to published L. curvatus sequences (Table 6).

TABLE 6
Bacillus and Lactilactobacillus isolates and their growth profiles.

| | | | | Fish | | | |
|---|---|---|---|---|---|---|---|
| | | | | size | Microaerophilic | Aerobic | 15° C. |
| Strain | Geography | Sample | Water | (g) | growth | growth | Growth |
| BvELA005 | Chile | Intestine | Freshwater | 38 | ND | + | + |
| BvELA006 | Chile | Intestine | Freshwater | 38 | ND | + | + |
| BvELA014 | Chile | Intestine | Freshwater | 95 | ND | + | + |
| BsELA015 | Chile | Intestine | Freshwater | 95 | ND | + | + |
| BsELA016 | Chile | Intestine | Freshwater | 95 | ND | + | + |
| BSELA017 | Chile | Intestine | Freshwater | 95 | ND | + | + |
| LcELA23 | Norway | Intestine | Seawater | 1500 | + | + | + |
| LcELA29 | Norway | Intestine | Seawater | 1500 | + | + | + |
| LcELA33 | Norway | Intestine | Seawater | 1500 | + | + | + |
| LcELA92 | Norway | Intestine | Seawater | 1500 | + | + | + |
| PTA-16 | Norway | Intestine | Seawater | 1500 | + | + | + |
| LcELA96 | Norway | Intestine | Seawater | 1500 | + | + | + |
| LcELA98 | Norway | Intestine | Seawater | 1500 | + | + | + |
| PTA-17 | Norway | Intestine | Seawater | 1500 | + | + | + |
| LcELA2 | North | Hindgut | Seawater | 1200 | + | + | + |
| | America | | | | | | |
| LcELA59 | North | Foregut | Seawater | 1200 | + | + | + |
| | America | | | | | | |
| LcELA60 | North | Foregut | Seawater | 1200 | + | + | + |
| | America | | | | | | |
| LcELA61 | North | Foregut | Seawater | 1200 | + | + | + |
| | America | | | | | | |
| LcELA62 | North | Foregut | Seawater | 1200 | + | + | + |
| | America | | | | | | |
| LsELA64 | North | Foregut | Seawater | 6000 | + | + | + |
| | America | | | | | | |
| LsELA65 | North | Foregut | Seawater | 6000 | + | + | + |
| | America | | | | | | |
| LfELA68 | North | Foregut | Seawater | 6000 | + | + | + |
| | America | | | | | | |
| LcELA388 | North | Foregut | Seawater | 6000 | + | + | + |
| | America | | | | | | |
| LsELA391 | North | Foregut | Seawater | 6000 | + | + | + |
| | America | | | | | | |

Bv: Bacillus velezensis,
Bs: B. subtilis,
Lc: Lactilactobacillus curvatus,
Ls: L. sake,
Lf: L. fuchuensis

### Growth Profiles

[0230] All the Lactilactobacillus strains had similar growth profiles. All the 18 strains grew on MRS agar and broth microaerobically and aerobically, at 15° C. and 23° C. This is consistent with their isolation from cold water fish in water temperature 8.7-12° C. Bacillus candidates also grew at 15° C. (Table 6).

### Example 5

### Genomic Characterization

### In Silico Analysis

[0231] A total of 18 genomes were sequenced and characterized in this study. The genomes of PTA-16 and PTA-17 were sequenced by PacBio sequencing platform while the remaining strains were sequenced using Illumina platform. PTA-16 contained 3 contigs yielding a total estimated genome size of 1.99 Mb and PTA-17 contained 2 contigs yielding a total estimated genome size of 1.97 Mb. The genome properties, prediction and annotation of different features are summarized in (Table 7).

TABLE 7
Genomic properties of Lactilactobacillus strains.

| | | | | | | | | | Transfer | Non- | | |
|---|---|---|---|---|---|---|---|---|---|---|---|---|
| | | Depth of | | | Regulatory | Repeat | Ribosomal | Transfer | messenger | coding | Misc. | Misc. |
| Strain | Contigs | coverage | Genes | CDSs | elements | regions | RNAs | RNAs | RNAs | RNAs | binding | feature |
| PTA-16 | 3 | 152 | 2,029 | 1,941 | 5 | 3 | 18 | 67 | 1 | 2 | 7 | 3 |
| PTA-17 | 2 | 746 | 2,007 | 1,921 | 6 | 1 | 18 | 65 | 1 | 2 | 7 | 3 |
| LcELA388 | 2 | 347 | 2,133 | 2,047 | 6 | 4 | 18 | 65 | 1 | 2 | 8 | 3 |
| LsELA391 | 3 | 413 | 2,135 | 2,045 | 7 | 1 | 21 | 66 | 1 | 2 | 6 | 3 |
| LcELA2 | 78 | 801 | 1,885 | 1,835 | 5 | 3 | 3 | 44 | 1 | 2 | 7 | 3 |
| LcELA23 | 88 | 689 | 1,922 | 1,867 | 6 | 1 | 3 | 49 | 1 | 2 | 7 | 3 |
| LcELA29 | 79 | 364 | 1,913 | 1,863 | 6 | 1 | 3 | 44 | 1 | 2 | 7 | 3 |
| LcELA33 | 94 | 794 | 1,897 | 1,842 | 5 | 3 | 3 | 49 | 1 | 2 | 7 | 3 |
| LcELA59 | 71 | 300 | 1,770 | 1,721 | 6 | 2 | 3 | 44 | 1 | 2 | 7 | 3 |
| LcELA60 | 67 | 347 | 1,778 | 1,728 | 6 | 2 | 3 | 44 | 1 | 2 | 7 | 3 |
| LcELA61 | 66 | 304 | 1,872 | 1,820 | 6 | 2 | 3 | 46 | 1 | 2 | 7 | 3 |
| LcELA62 | 69 | 304 | 1,809 | 1,761 | 6 | 1 | 2 | 44 | 1 | 2 | 7 | 3 |
| LcELA92 | 79 | 598 | 1,879 | 1,829 | 5 | 3 | 3 | 44 | 1 | 2 | 7 | 3 |
| LcELALA96 | 79 | 731 | 1,890 | 1,840 | 5 | 3 | 3 | 44 | 1 | 2 | 7 | 3 |
| LcELA98 | 76 | 877 | 1,914 | 1,865 | 6 | 1 | 2 | 44 | 1 | 2 | 7 | 3 |
| LfELA68 | 45 | 337 | 1,842 | 1,816 | 6 | 1 | | 23 | 1 | 2 | 6 | 3 |
| LsELA64 | 41 | 229 | 2,089 | 2,032 | 7 | 3 | 2 | 52 | 1 | 2 | 6 | 3 |
| LsELA65 | 22 | 419 | 1916 | 1883 | 7 | | | 30 | 1 | 2 | 8 | 3 |

### Phylogenetic Analysis

[0232] Phylogenetic relationships of the genomes were explored with UBCG v3.0, which employs a set of 92 single-copy core genes commonly present in all bacterial genomes. These genes then were aligned and concatenated within UBCG using default parameters. The estimation of robustness of the nodes is done through the gene support index (GSI), defined as the number of individual gene trees, out of the total genes used, that present the same node.

[0233] Phylogenetic analysis was performed on 18 Lactobacillus strains with L. reuteri strain ATCC PTA-126788 as an outgroup. As shown in FIG. 1, different Lactobacilli neatly grouped into their respective species clades.

### Comparative Genomics Analyses

[0234] Ortholog analysis was performed to identify paralogous and/or orthologous relationships between genomes of L. curvatus, L. sakei and L. fuchuensis strains. Overall, 98.6% of the genes were shared between strains with 1215 orthogroups having membership of at least one gene in all 18 genomes. L. curvatus strains PTA-16 and PTA-17 shared 1681 and 1663 genes among them, respectively. Orthology-based multi-protein phylogenetic tree was used to identify optimal strain combinations from different clades.

### Screening for Prophages, ISs and Transposases

[0235] Genomes were scanned for the presence of mobile genetic elements such as prophages, insertion sequences (ISs) and transposases. Both PTA-16 and PTA-17 strains contained seven prophage regions each. However, there were 3 phage genes (all coding for Tyrosine recombinase protein) in both genomes that were outside of prophage regions. Putative IS and associated proteins predicted by ISEscan revealed 79 ORFs in 10 IS families in strain PTA-16 and 68 ORFs in 10 IS families in strain PTA-17.

### Absence of Virulence Factors and Toxins

[0236] Both PTA-16 (3 contigs) and PTA-17 (2 contigs) strains were confirmed to be free of known virulence factors and/or toxins by comparing against virulence factor database (VFDB; search parameters of 380% identity and 380% alignment length/coverage), which is an integrated comprehensive online resource database for curating information about bacterial virulence factors and/or toxins. All other genomes were also free of virulence factors and toxins.

### Absence of Acquired Antimicrobial Resistance Genes

[0237] The genomes of PTA-16 and PTA-17 along with other Lactilactobacillus strains were searched for potential antimicrobial resistance genes against multiple AMR databases including NCBI-AMR, Resfinder DB and ARG-ANNOT using Abricate. The screening did not identify any potential antimicrobial resistance genes in any of the genomes except for LcELA65. LcELA65 contained a gene encoding tetracycline-resistant ribosomal protection protein (tetW) that confers resistance to tetracycline.

### Screening for Genes Involved in Biogenic Amines and Toxins

[0238] Functional annotation of the PTA-16 and PTA-17 genomes revealed that these strains do not contain any known protein-encoding genes involved in the production of biogenic amines with the exception of ornithine decarboxylase in the genome of PTA-16. Interestingly, both genomes had incomplete CDSs encoding tyrosine decarboxylase. No other toxins were identified in the genomes of both strains.

### Genes Involved in the Production of Lactic Acid and Other Beneficial Metabolites

[0239] Both PTA-16 and PTA-17 strains contained one CDS encoding for L-lactate dehydrogenase. However, no CDS encoding for D-lactate dehydrogenase (EC 1.1.1.28) was found in any of the sequenced strains.

[0240] Several coding sequences involved in adhesion of Lactobacilli to intestinal epithelium including chaperonin GroEL, signal peptidase II and elongation factor Tu were identified in both PTA-16 and PTA-17 genomes. Search for desired stress tolerance features in PTA-16 and PTA-17 strains revealed the presence of three CDSs encoding for DNA protection during starvation. Another stress resistant gene putatively encoding for phosphate starvation-inducible PhoH-like protein was also found in both strains.

### Example 6 Antimicrobial Susceptibility

[0241] Minimum inhibitory concentrations were analyzed against relevant antibiotics according to EFSA guidelines (Rychen et al. EFSA Journal (2018) 16 (4): e05206), including Ampicillin, Vancomycin, Gentamicin, Kanamycin, Streptomycin, Erythromycin, Clindamycin, Tetracycline and Chloramphenicol. BvELA005, BvELA006, BvELA014, BsELA015, and BsELA017 were determined to be sensitive to all relevant antibiotics according to EFSA guidelines, while BsELA016 was sensitive to all relevant antibiotics except streptomycin, which was a two-fold dilution above the EFSA cut-off. BvELA005, BvELA006, BvELA014, BsELA015, BsELA017, LcELA33, LcELA92, PTA-16, LcELA96, LCELA98, PTA-17, LcELA59, LCELA60, LCELA61, and LsELA391 strains were sensitive to all relevant tested antibiotics according to EFSA guidelines (Rychen et al. EFSA Journal (2018) 16 (4): e05206), with MIC values at or below the reported species characteristic cut-off values (FIG. 3). BsELA16 and LcELA2 were one- or two-fold dilutions above EFSA microbiological cutoff of streptomycin, and LcELA23, LcELA29, LcELA62, and LcELA388 were one or two fold dilutions above cut off value of tetracycline, ampicillin, chloramphenicol, and erythromycin, respectively. This is considered acceptable due to the technical variation of the phenotypic method as recognized previously. NCCLS. Development 578 of in vitro susceptibility testing criteria and quality control parameters; approved 579 guideline 2nd ed. Wayne, PA, USA.: NCCLS documents M23-A2 NCCLS; 2001. LfELA68 was not viable in any MIC medium tested; LsELA64 and LsELA065 were highly resistant to tetracycline which rules them out as probiotic candidates.

### Example 7

### In Vivo Efficacy

[0242] Five test products and one negative control product (FIG. 4A) were added to commercial fish pellets and fed to six groups of 100 fish each divided between two tanks per group. 10 fish were randomly selected from each tank, weighed, and returned on study days (SD)-1, 18, and 33. 70 fish were weighed, and all euthanized at the end of the study on SD 45 (FIG. 4B). While TP1 (Test Product 1), TP2, TP4, and TP5 weights did not differ significantly from NCP, TP3 weighed significantly more (p<0.01, n=70). Average weights for TP1, TP2, TP3, TP4, TP5, and NCP respectively were 67.61 g, 62.40 g, 70.23 g, 67.79 g, 66.56 g, and 67.37 g. Weights relative to the control group were 0.4%, −1.7%, 4.2%, 0.6%, and −1.7% for TP1, TP2, TP3, TP4, and TP5, respectively. No gross pathology (data not shown) nor mortality revealed concerns about safety, and the study timeline is shown in FIG. 4C.

### Global Untargeted Metabolomic Analysis

[0243] In order to compare the responses of both strains to different media additives, we compared their metabolomics profiles under different growth conditions. For the comparison, we carried out a principal component analysis of the log₂ fold-changes of feature abundances in each of the treatments compared to their average levels when the cells were grown on glucose. We only considered MS features present across all conditions with at minimum a 2-fold change in abundance compared to the glucose control in at least one sample (192 metabolites in total). As observed in FIG. 5, metabolomics profiles clustered by strain along the first principal component, representing over 50% of the variance in feature changes across strains, growth conditions and technical replicates. While media additives such as N-acetyl-glucosamine, and galactooligosaccharides (GOS) resulted in minor differences compared to the glucose control, additives including lactose, inulin, and GOS amended with vitamins and zinc resulted in larger metabolite shifts. Notably, the addition of bile salts resulted in distinct metabolomic profiles explaining most of the variance along the second principal component and clustering the samples of both strains.

[0244] Comparing the magnitude of feature abundance changes showed that the different media additives caused more features to increase in abundance by more than ten-fold in PTA-17 than PTA-16 when compared to a glucose control (FIG. 6). Many of the prebiotic ingredients tested resulted in more than twice the number of features with increased expression in PTA-17.

[0245] Looking at the abundances of individual features across media additives instead of the changes relative to a control media showed less clustering of samples by strain (FIG. 7). So, while the overall composition of both strains for the features analyzed is similar across conditions, strains respond differently to distinct additives. Consistent with the above results, samples from both strains supplemented with bile acids cluster together and away from the remaining treatments. Additionally, addition of lactose leads to the highest divergence in metabolomics profiles between both strains.

[0246] Out of the recovered MeSH terms associated with potential metabolites produced by the strains, 46% corresponded to chemicals, 10% to diseases, 6% to physical processes and 5%, to living organisms (FIG. 8). For example, multiple compounds (Aurafuron, Antramycin, Pladienolide, Epiderstatin, Eponemycin, Gancidin, and Medelamine) were associated with antibiosis, and metabolites including cycloleucine and 3-Methyleneindolenine were associated with body weight.

[0247] Out of about 200 features analyzed, 136 could be mapped to 5 or less potential identities in the MicroMGX database and none were uniquely mapped (Data not shown). In order to gain a broad idea of the possible physiological roles of these molecules we followed the approach outlined by Sartor et al. (PMID: 22492643) to identify medical subject headings (MeSH terms) associated with metabolites detected in cultures of LC100 and LS93 based on their co-occurrence across published research. The inventors identified at least one MeSH term associated with 39 out of 179 potential metabolite identities of MS features, representing 10005 significant associations (FDR<0.05) to 6239 MeSH terms (FIG. 9). These relationships illustrate the extent to which the identified compounds have been previously discussed in the scientific literature. Most of the associations uncovered were accounted for by Adenine and Biotin, whose central metabolic roles have been extensively studied. For the remaining metabolites, between 4 and 725 associations were identified.

[0248] With the goal to isolate and develop endogenous microbial isolates as potential probiotics to improve weight gain and enhance disease resistance in salmon, samples were collected from various growth stages (parr, smolts and grower) and major fish production sites (Norway, Chile, and North America). Smejkal G B, Kakumanu S. Safely meeting global salmon demand. npj Science of Food. 2018; 2 (1); rsen A, Asche F, Hermansen Ø, Nystøyl R. Production cost and competitiveness in major salmon farming countries 2003-2018. Aquaculture. 2020; 522:735089.

[0249] Parr and smolts were raised at 11-12° C. in freshwater while growers were raised at 8.7-12° C. in seawater. A library of 900 bacterial isolates were cultured from the intestines, skin, and gills of farmed Atlantic salmon. 16S rRNA sequencing identified 623 of these organisms, which informed selection of probiotic candidates from promising genera, sample diversity, and regulatory lists. Carnobacterium, Alivibrio and Lactobacillus were among the top probiotic genera isolated from Norwegian and North American samples. Carnobacteria are lactic acid bacteria which dominate fish hindgut by population; and non-pathogenic strains of Carnobacteria have been previously shown to improve weight gain and disease resistance in farmed Atlantic cod and salmon. Similarly, bathing with Alivibrio strains improves growth and FCR, and reduces mortality in Atlantic salmon. Spore-forming Bacillus are not a major part of the endogenous microbes of salmon; in agreement with this, strains belonging to Bacillus were only isolated from Chilean salmon samples but not from Norwegian and North American salmon samples.

[0250] Owing to their proven health benefits and long history of safe use, Lactobacilli are among one of the most commonly used probiotics in both human and animal health and are increasingly being evaluated as potential probiotics for fish.

[0251] With the goal to develop native Lactobacilli from salmon gut as Direct Fed Microbials (DFMs), the inventors chose isolates belonging to Lactobacillus species from foregut and hindgut samples that are listed in qualified presumption of safety (QPS) list put forth by the European Food Safety Authority for further characterization. Koutsoumanis K, Allende A, Alvarez-Ordóñez A, Bolton D, Bover-Cid S, Chemaly M, et al. Update of the list of QPS-recommended biological agents intentionally added to food or feed as notified to EFSA 11: suitability of taxonomic units notified to EFSA until September 2019. EFSA Journal. 2020; 18 (2). Indeed, all Lactobacillus strains isolated from salmon intestine were identified by 16S rRNA sequencing as members of the QPS list. Despite the long-established potential for lactic acid bacterial probiotics, only one product containing Pediococcus acidilactici is commercially available. The L. curvatus strains PTA-16 and PTA-17 described herein may be used as probiotics in Atlantic salmon.

[0252] Whole genome sequencing of Lactilactobacillus isolates allowed species identity confirmation from 16S sequencing, revealing 15 L. curvatus and three L. sakei isolates, confirming their place on the QPS list. In the initial round of strain characterization, we used Illumina platform to sequence and assemble the genomes of all 18 strains. Phylogenetic analysis has previously divided L. curvatus by its ability to metabolize plant-derived carbohydrates, so PTA-16 and PTA-17 were selected from diverse phylogenetic groups and fish specimens to form consortia for the in vivo study. PTA16 and PTA17 were further sequenced using PacBio sequencing platform. Long read sequencing technology enabled complete genome characterization with each genome represented by large, nearly complete contigs.

[0253] Comprehensive functional annotation of the L. curvatus strains PTA-16 and PTA-17 revealed presence of several genes important for probiotic efficacy. Probiotic bacteria are known to contain bioactive secondary metabolites that interact with other pathogenic bacteria to attenuate virulence.

[0254] Neither of the selected candidates seem to possess any bacteriocins found in Enzybase nor AntiSMASH. Analysis for antibiotic resistance genes revealed no hits using ResFinder, supporting PTA-16 and PTA-17 as safe probiotic candidates. Both PTA-16 and PTA-17 strains contained one coding sequence encoding L-lactate dehydrogenase (EC 1.1.1.27), which is responsible for lactic acid production. CDS encoding D-lactate dehydrogenase (EC 1.1.1.28) was not found in any of the strains. While the diversity of phages in gut ecosystems is getting increasingly well-characterized, knowledge is limited on how phages contribute to the evolution and ecology of their host bacteria. Prophage analysis of PTA-16 and PTA-17 showed 7 prophage regions each. Prophages can be advantageous for gut symbionts like L. curvatus by increasing its competitiveness in the intestinal niche.

[0255] Without being bound to a particular theory, the inventors found that the probiotics described herein are more effective than terrestrial probiotics, due to their adaptation to fish physiology and specific salinity and temperature requirements. While Bacillus probiotics have shown promising growth improvement in salmonids and other fish, the inventors found that their study revealed no improvement in terrestrial probiotics, nor in native Bacillus candidates, but only in native Lactilactobacillus candidates. As diadramous fish, salmon live in both freshwater and seawater. Lactobacillus dominate the gut of saltwater salmon compared with freshwater fish, and they are generally not recovered from very early stages. While these candidates were examined in available freshwater, growth in the Lactilactobacillus-fed group was significant improved at the end of the relatively short study. Lactilactobacillus probiotic's growth-enhancing effect may be amplified in longer freshwater as well as seawater environments.

[0256] Based on this in vivo performance improvement, PTA-16 and PTA-17 were further analyzed for their ability to secrete various metabolites in the first comprehensive study in the presence of different prebiotic additives. Synbiotics are the synergistic combination of prebiotic with probiotics, and since they have been shown to be beneficial in Caspian salmon, the inventors sought to identify potential prebiotics to enhance the efficacy of two L. curvatus candidates. Metabolomics revealed that when 11 prebiotics added to culture media, at least ten-fold PTA-16 and PTA-17 features were up- or down-regulated. This suggests that a synbiotic combination of the top probiotic candidates with one or more of these prebiotics is a promising approach to improve salmon performance.

[0257] For PTA-17, features are especially increased in the presence of inulin, GOS supplemented with vitamin D, vitamin C, zinc, and all three. Vitamin C and zinc have already been studied for supplementation for Atlantic salmon health so its inclusion with fish feed would be accessible and familiar to farmers. Inulin and GOS are popular, widely available prebiotics.

[0258] Features are especially decreased in the presence of bile salts, reflecting expected probiotic/digestive system interplay. For PTA-16, features are especially decreased in the presence of lactose and bile salts. The differences in feature upregulation between species in the presence of GOS is predicted by previous work on Lactobacillus galactooligosaccharide metabolism. These prebiotics could potentially work synergistically with PTA-16 and PTA-17 and enhance weight gain.

[0259] The inventors showed comprehensive genomic and promising in vivo evidence to support the safety and efficacy of two L. curvatus probiotic candidates, PTA-16 and PTA-17 as potential probiotics for salmon.

### Example 8

### Isolation of Lactobacillus Strains

[0260] A study and project was conducted to isolate and identify bacterial strains to act as probiotics for sustainable eco-friendly antibiotic alternatives for aquaculture. Challenges and goals in aquaculture include: disease outbreaks such as with sea lice, SRS; increasing pressure to reduce antibiotic/chemical use-resistance, environmental impact; longer production cycle-2-3 years; and provision of fish meal alternatives. Probiotics have the potential to address these challenges by (1) preventing and treating diseases; modulate immune response; disease resistance; (2) accelerating growth and development; improving FCR, PER, digestibility; and (3) are eco-friendly; promote a healthy environment; and improving water quality.

[0261] Piscirickettsia salmonis causes salmon rickettsial septicemia (SRS). SRS has a significant economic impact on the aquaculture industry, in an amount $600-700 million annually in Chile alone. SRS is the number one cause of salmon mortality and morbidity, to an amount of about 70% worldwide. Another agent causing issues in aquaculture is Tenacibaculum maritimum which causes fit rot. Fit rot has a significant economic impact on the aquaculture industry, in an amount $35 million or so worldwide annually. Fit rot results in eroded mouth, skin, fins and gills and the fish are not suitable for commercial use or sale.

[0262] A study was conducted to evaluate and identity potential probiotic bacteria. Existing libraries of probiotic bacteria were evaluated and native microbes from salmon were isolated and screened. The isolated native microbes were assessed to identify and characterize them by 16S rRNA sequence (to identify species) and through whole genome sequencing. Existing libraries of probiotic bacteria were similarly evaluated. The bacteria were then characterized in vitro to assess antimicrobial activity against P. salmonis & Tenaci and through whole genome sequencing (WGS) to characterize them for digestive enzymes, bacteriocins, anti-inflammatory molecules etc. Selected strains were then evaluated for efficacy in salmon by assessing performance (FRC, weight gain) and for salmon rickettsial septicemia (SRS) prevention.

[0263] Native microbe strains were isolated from parr gut of Chilean salmon and also from grower gut of Norway salmon. Isolation from the salmon improved the likelihood that bacteria capable of growing in the cold water aquaculture conditions could be isolated. Promising Lactobacillus strains, particularly Lactilactobacillus curvatus and Lactilactobacillus sakei were isolated and identified.

[0264] A tabulation of some isolated or selected strains is shown below in TABLE 8.

TABLE 8

| | | | Antimicrobial | 15° |
|---|---|---|---|---|
| Strain | Origin | Source | Resistance | Growth |
| BVELStrain A | Chile | parr | — | 4 |
| | | gut | | |
| BSUBStrain B | Chile | parr | — | 4 |
| | | gut | | |
| LSAK204093 | Norway | grower | — | 4 |
| | | gut | | |
| LCUR204100 | Norway | grower | — | 4 |
| | | gut | | |

[0265] Bacillus strains and Lactobacillus strains were evaluated as probiotic candidates for performance and SRS resistance. A first study of several Bacillus strains and Salmon Lactobacillus strains 93 (ELA202093) and strain 100 (ELA204100) was conducted. Study design is as follows in TABLE 9 and aspects of the study are shown in FIG. 10. A control and 5 bacteria groups were evaluated: Negative Control is standard diet only; TP1 is B. amyloliquefaciens Strain A+B. subtilis Strain A+B. amyloliquefaciens Strain B+Standard diet; TP2 is B. velezensis Strain A+B. subtilis Strain B+B. subtilis Strain A+Standard diet; TP3 is L. curvatus ELA204100+L. sakei ELA204093+Standard diet; TP4 is L. curvatus ELA204100+L. sakei ELA204093+B. subtilis Strain A+Standard diet; TP5 is B. velezensis Strain A+B. subtilis Strain B+L. curvatus ELA204100+Standard diet.

[0266] Results of the evaluation in terms of growth and body weight as a performance measure are depicted in FIGS. 11-13. Top probiotic bacteria candidate sample information is provided in FIG. 14.

TABLE 9

| Study Day | Study Activity |
|---|---|
| −7-0 | Acclimatization |
| −1 | Randomization; weight (individual) |
| All Study | Record daily observations |
| Days 0-70 | Feed issue as needed; probiotic feed will be fed all |
| | through this phase; record feed intake |
| 35 | Weight (individual); sacrifice 10 salmon per treatment - |
| | sample collection (blood and gut samples) |
| | Weight Gain Ratio (WGR); Feed Conversion Ratio (FCR); |
| | Specific Growth Rate (SGR) |
| 36-39 | Temperature conditioning for P. salmonis challenge |
| 40 | Challenge with P. salmonis |
| 50-60 | Observe for mortality/clinical signs |
| 60-70 | Sacrifice 10 salmon per treatment - sample collection |
| | (blood and gut samples) |
| | Mortality/survival (%) |
| | Microbiome profiling |
| | Gut histology |
| | Cytokines and other serum markers |

### REFERENCES

[0267] Azad M A K, Sarker M, Wan D. (2018) Immunomodulatory Effects of Probiotics on Cytokine Profiles Biomed Res Int v 2018 doi: 10.1155/2018/8063647
[0268] Cousin F J, Lynch S M, Harris H M, McCann A, Lynch D B, Neville B A, Irisawa T, Okada S, Endo A, O'Toole P W. (2015) Detection and Genomic Characterization of Motility in Lactobacillus curvatus: Confirmation of Motility in a s Species outside the Lactobacillus salivarius Clade. Appl Env Microbiol 81 (4).
[0269] Gatenby, C. (2017). From Wells to Watersheds: The Land Between Two Rivers [Web log post]. Retrieved Oct. 19, 2020, from https://usfwsnortheast.wordpress.com/2017/08/02/from-wells-to-watersheds-the-land-between-two-rivers/
[0270] Hartviksen M, Vecino J L G, Kettunen A, Myklebust R, Ruohonen K, et al. (2015) Probiotic and Pathogen Ex-vivo Exposure of Atlantic Salmon (Salmo salar L.) Intestine from Fish Fed Four Different Protein Sources. J Aquac Res Development 6:340. doi: 10.4172/2155-9546.1000340
[0271] Jones, G. 2019. Aqua Vaccines Research within REI, Elanco Meeting PP
[0272] Marine Harvest/MOWI. 2018. Salmon Farming Industry Handbook.
[0273] Marshall, S. H., Gómez, F. A., Klose, K. E. (2014) The Genus Piscirickettsia. In: Rosenberg E., DeLong E. F., Lory S., Stackebrandt E., Thompson F. (eds) The Prokaryotes. Springer, Berlin, Heidelberg
[0274] Peña A, Marshall, S. BMC Research Notes 2010, 3:101 http://www.biomedcentral.com/1756-0500/3/101
[0275] Rodriguez, J. 2015. Aquaculture: a Thriving Growth Story, Elanco Meeting PP
[0276] Rozas-Serri M, Enriquez R. 2013. Piscirickettsiosis and Piscirickettsia salmonis in fish: a review. J. Fish Dis. 37 (3)
[0277] Santos Y., F. Pazos and J. L. Barja (No. 55), Revised by Simon R. M. Jones and Lone Madsen. Tenacibaculum maritimum, causal agent of tenacibaculosis in marine fish. ICES Identification Leaflets for Diseases and Parasites of Fish and Shellfish. No. 70. 5 pp. http://doi.org/10.17895/ices.pub.4681
[0278] Yañez A, Silva H, Valenzuela K, Pontigo J, Godoy M, Troncoso J, Romero A, Figueroa J, Carcamo J, Avendaño-Herrera R. 2013. Two novel blood-free solid media for the culture of the salmonid pathogen Piscirickettsia salmonis. J. Fish Dis. 36 (587-591).

### Example 9

### Effect of Dietary Supplementation of Probiotics on Growth Performance, Immune Response, Antioxidant Properties and Survival of Atlantic Salmon (Salmo salar) in the Presence of Salmonid Rickettsial Syndrome (SRS) Challenge

[0279] Disease outbreaks cause tremendous losses to the salmonid farming industry and have become a major constraint for modern salmon farming. For microbial pathogens, there is an industry effort towards antibiotic reduction due to emergence of antibiotic-resistant bacteria and in line with best practice usage evolving across farm animal species. Probiotics are a viable, eco-friendly alternative to antibiotics. Probiotics are live microorganisms which when administered in adequate amounts confer a health benefit on the host. Originally introduced to control diseases in aquaculture, the use of probiotics has been extended to improve weight gain and performance. In aquaculture, probiotics contribute to disease prevention through competitive exclusion of pathogenic bacteria, production of antimicrobial molecules and enhancing the host immune system, which is one of the most purported benefits of using probiotics in aquaculture. The ability of probiotics to produce various digestive enzymes (better nutrient digestibility) and improve gut health (better nutrient absorption) may contribute to improved feed conversion ratio and weight gain.

[0280] Bacillus and Lactobacillus species are among the most commonly used probiotics in aquaculture. Bacillus species offer many unique advantages-being a spore former, Bacillus are known for their stability during harsh pelleting temperature, top coating, on the feed, and in the GI environment of the salmon. Bacillus are also well known for producing various antimicrobial peptides and digestive enzymes. The relative ease of fermentation/process, low cost of production and long shelf life of the final product further adds to the attractiveness of Bacillus species as probiotics for salmon.

[0281] Salmonid Rickettsial Syndrome (SRS, also known as piscirickettsiosis), caused by the facultative Gram-negative intracellular bacterium Piscirickettsia salmonis, is one of the most economically important diseases of salmon. Next to sea lice, SRS causes the most severe economic losses to Chilean salmon production, and leads to extensive antibiotic use totaling 300 tons in the seawater phase. The Chilean National Fisheries and Aquaculture Service (SERNAPESCA) estimates losses due to SRS to be over 700M USD per year, including direct losses due to disease, as well as costs related to antibiotics, vaccines and feed, and reduction in quality and size of surviving fish. The disease was first reported in Chile in 1989, and still today, 47.6% of all farmed salmonid mortalities of 2019 (including Atlantic salmon, Coho salmon and trout) are attributed to SRS. P. salmonis has also sporadically been found in other salmon-producing countries (Ireland, Norway, Canada, US and Scotland), with recent outbreaks on the west coast of Canada, but Chilean strains have higher virulence than others, as well as in other marine fish species.

[0282] In the study design, we evaluate the effect of dietary supplementation of spore-based, Bacillus probiotics on growth performance, immune response, and antioxidant properties, as well as survival of Atlantic salmon in the presence of SRS challenge. This study design is selected to minimize animal numbers while controlling for tank effect and variation due to individual fish feeding behavior. Should results indicate favorable effect of probiotics on the growth performance and survival in the presence of SRS challenge, it is anticipated that further studies would be needed to more fully explore the efficacy and benefits of probiotics. The present study evaluates the effect of dietary supplementation of Lactobacillus and Bacillus probiotics on growth performance, immune response, and antioxidant properties, as well as survival of Atlantic salmon in the presence of SRS challenge. Seven probiotic candidates will be evaluated in five combinations compared to a negative control.

[0283] This study uses a functionally blinded, replicated controlled design with facility owned, farmed Atlantic salmon held in FW. To determine the Challenge Model with target cumulative mortality of 20-30%, 120 fish are enrolled, per the defined inclusion criteria, which includes a set bodyweight range. 30 fish per tank will distributed in 4 tanks of 100 L. A disease titration with P. salmonis isolate AT17-209 is performed in single tanks at four concentrations (10-2,5, 10-3, 10-3,5 and 10-4). Fish are intraperitoneally injected with 0.1 ml of each inoculum dilution, using an appropriate needle size according to fish size as per SOP “Inoculación de patógenos en peces”. The challenge assessment is expected to finalize after 35±10 days, by comparing different specific survivals obtained by inoculum concentration.

[0284] Six hundred and twenty four (624) additional fish are selected for inclusion to the study during this process per the defined inclusion criteria, which includes a set bodyweight range. All fish are anaesthetized and individually weighed. Included fish will be distributed without intentional bias in twelve study tanks randomly allocated to 6 groups with 2 replicate tanks for each group. Study fish are offered unmedicated diet post-handling.

[0285] Post inclusion and study tank set up, study fish are acclimated for a minimum of 7 days without handling. To understand the baseline microbiome and immune parameters before treating with probiotics, 24 samples (2 samples per tank) are collected and combined from all groups on study day (SD)-1, the remaining 50 fish per tank will be anaesthetized then individually weighed. Fish bodyweights from SD-1 will be used to forecast and calculate the specific feed rate of the test diets with target minimum dose rates over the study period.

[0286] The administration of the test diets begins in the study tanks on SD 0, for a period of 35 days, from now on referred to as Phase 1 (See Table 10). To understand the effect of probiotics on the microbiome and immune parameters in the absence of SRS challenge, we collect 20 samples per treatment (10 samples per tank) before P. salmonis challenge. Upon completion of Phase 1, Phase 2 begins which considers to increase the temperature from 11±2° C. to 15±2° C., maintaining delivery of medicated feed and Challenge with P. salmonis strain AT17-209 dilution selected from challenge model. Efficacy will be evaluated based on the registration of daily mortality post-challenge and signs of disease in surviving fish. The challenge endpoint is three consecutive days without any deaths in either group in a single tank, after the onset of mortality. To understand the effect of probiotic candidates on the microbiome and immune parameters in the presence of SRS challenge, we collect 20 samples per treatment (10 samples per tank) at the end of the study. All surviving fish are euthanized with an anesthetic overdose and will be assessed for signs of disease. A total of 70±10 days of study among Phases 1 and 2.

TABLE 10
Tabular overview of treatment groups. Tank replicates
are indicated by ‘A’ and ‘B’.

| Study | Group | Replicate | | No. |
|---|---|---|---|---|
| Tank | identifi- | identifi- | | of |
| ID | cation | cation | Treatment description | fish |
| 1 | Chi- | A | B. amyloliquefaciens | 50 |
| | nook 1 | | ELA191024 + B. subtilis | |
| | (TP 1) | | ELA191105 + B. amyloliquefaciens | |
| | | | ELA202071 + Standard diet | |
| 2 | Chi- | 8 | B. amyloliquefaciens | 50 |
| | nook 1 | | ELA191024 + B. subtilis | |
| | (TP 1) | | ELA191105 + B. amyloliquefaciens | |
| | | | ELA202071 + Standard diet | |
| 3 | Chi- | A | B. velezensis ELA204005 + | 50 |
| | nook 2 | | B. subtilis ELA204016 + | |
| | (TP 2) | | B. subtilis ELA191105 + | |
| | | | Standard diet | |
| 4 | Chi- | B | B. velezensis ELA204005 + | 50 |
| | nook 2 | | B. subtilis ELA204016 + | |
| | (TP 2) | | B. subtilis ELA191105 + | |
| | | | Standard diet | |
| 5 | Chi- | A | L. curvatus ELA204100 + | 50 |
| | nook 3 | | L. sakei ELA204093 + | |
| | (TP 3) | | Standard diet | |
| 6 | Chi- | B | L. curvatus ELA204100 + | 50 |
| | nook 3 | | L. sakei ELA204093 + | |
| | (TP 3) | | Standard diet | |
| 7 | Chi- | A | L. curvatus ELA204100 + | 50 |
| | nook 4 | | L. sakei ELA204093 + | |
| | (TP 4) | | B. subtilis ELA191105 + | |
| | | | Standard diet | |
| 8 | Chi- | B | L. curvatus ELA204100 + | 50 |
| | nook 4 | | L. sakei ELA204093 + | |
| | (TP 4) | | B. subtilis ELA191105 + | |
| | | | Standard diet | |
| 9 | Chi- | A | B. velezensis ELA204005 + | 50 |
| | nook 5 | | B. subtilis ELA204016 + | |
| | (TP 5) | | L. curvatus ELA204100 + | |
| | | | Standard diet | |
| 10 | Chi- | B | B. velezensis ELA204005 + | 50 |
| | nook 5 | | B. subtilis ELA204016 + | |
| | (TP 5) | | L. curvatus ELA204100 + | |
| | | | Standard diet | |
| 11 | NCP | A | Standard diet | 50 |
| 12 | NCP | B | Standard diet | 50 |

### Schedule of the Study

[0287] A tentative outline of important study events is given in Table 11 for the milestones of the Challenge model and in Table 12 the in vivo events.

TABLE 11

| Study | |
|---|---|
| Day (±2 | |
| days) | Milestones of Challenge Model |
| Prior to | Select fish population of 120 healthy Atlantic salmon and |
| study | distribute 30 fish in each four tanks of 100 L. |
| −7 | Tank set up, start of acclimatization. Weigh all fish |
| during | Increase water temperature in tanks, from 11.0 ± 2° C. |
| acclimation | to 15 ± 2° C. |
| Daily | Maintain groups per normal husbandry, record mortalities |
| −1 | Fast |
| 0 | Challenge four dilutions. Weigh all fish |
| 35 ± 5 | End of Challenge model |

TABLE 12
Proposed schedule of in vivo study events.

| Study | |
|---|---|
| Day (±2 | Study |
| days) | Activity |
| Prior to | Health assessment |
| Study | |
| −7 | 624 fish will be enrolled and distributed in tanks (52 |
| | fish per tank). |
| | All fish will be individually measured and weighed (100% |
| | population). |
| −7 to 0 | Acclimation; Randomization |
| −1 | Weight sampling; all fish will be individually weighed |
| | (100% population) |
| | Sample collection; 2 fish per tank will be euthanized and |
| | sampled (blood and gut samples) |
| All | Record daily observations |
| Study | Sample weight each two weeks for feeding rate calculation |
| Days | Feed probiotic feed will be delivered from SD 0 and on (until |
| 0-70 | end of trial) |
| 34 | Fish will be fasted |
| 35 | Sample collection; 10 fish per treatment will be euthanized |
| | and sampled (blood and gut samples) |
| 35-38 | Temperature conditioning for P. salmonis challenge. Feed will |
| | be changed caliber gradually |
| 39 | Fish will be fasted |
| 40 | Challenge with P. salmonis. Weight sampling; all fish will be |
| | individually weighed (100% population). Fish will be fed with |
| | Nutra 60 |
| 60-70 | Weight sampling; all fish will be individually measured and |
| | weighed (100% population). Sample collection; 20 fish per |
| | treatment will be euthanized and sampled (blood and gut |
| | samples) |
| | Mortality/survival rate (%) |

### Experimental Fish and Rearing Conditions

### Experimental Animal Description

[0288] Atlantic salmon recruited to the study will be from laboratory stock maintained at the Aquarium Facility. Animal identification is summarized in Table 13.

TABLE 13
Summary of animal identification for Atlantic
salmon recruited to the study.

| | Challenge model | Probiotic evaluation |
|---|---|---|
| Species: | Atlantic salmon | Atlantic salmon |
| Fish Size: | Approximately | Approximately 40 g [30-50 g] |
| | 60-70 g average | at Day 0; No fish below 30 g will |
| | at Day 0 | be included at day 0. |
| Origin: | 2020_03 OV2AQG | 2020_03 OV2AQG |
| Age: | Parr | Parr |
| Gender: | Mixed | Mixed |
| Number: | 120 fish | 624 fish of which 600 will be |
| | | enrolled to the study. |
| Physiological | Clinically normal | Clinically normal pre-smolts |
| status: | pre- smolts | |
| Pre-treatment: | Not applicable | Not applicable |

### Animal Housing and Management

[0289] Over the study period, fish will be maintained in 100 L tanks of flow through fresh water under a photoperiod regime of 24-hour day light. Water flow during the holding period and during experimental period will be set at a rate to ensure a minimum of 2.0 total volume water exchange/hour.

[0290] If required, supplemental oxygen will be delivered to the tank water to maintain appropriate saturated oxygen levels (70-130% saturation). Water temperature for all tanks will be recorded daily. Temperature will be maintained at 12±2° C. during acclimation and Phase 1 and at 15±2° C. during challenges, with any adjustments using less than 2° C. change in a single day. Fish will not undergo any smoltification manipulation for this study.

### Inclusion to Study

[0291] Before SD-7, tank populations under consideration for the study will be screened for preinclusion to the study and a pre-study health declaration will be completed. Only tanks meeting the criteria will be anaesthetized and assessed on SD-7. If more than 600 animals are eligible for enrollment, only the first 624 eligible animals assessed will be enrolled. Participating fish must be:
[0292] Deemed by the Clinical Investigator and/or AV to be clinically healthy, sexually immature and without apparent deformities.
[0293] Average weight (see Table 13).
[0294] Data will be recorded

### Exclusion

[0295] In addition to the conditions above in inclusion, the following criteria will exclude individual fish prior to study:
[0296] Sick, weak, or stressed fish
[0297] Fish with visible signs of damage to the skin or mucous layer
[0298] Fish weighing less than 30 grams or exceeding 50 grams on day 0 phase 1

### Test Products

[0299] Five Test Products (TPs) will be assessed, each consisting of fish feed prepared with spores of Bacillus and/or with Lactobacillus as follows:
[0300] 1. Chinook 1 (Test Product 1): B. amyloliquefaciens StrainA+B. subtilis StrainA+B. amyloliquefaciens StrainB+Standard diet
[0301] 2. Chinook 2 (Test Product 2): B. velezensis StrainA+B. subtilis StrainB+B. subtilis StrainA+Standard diet
[0302] 3. Chinook 3 (Test Product 3): L. curvatus ELA204100+L. sakei ELA204093+Standard diet
[0303] 4. Chinook 4 (Test Product 4): L. curvatus ELA204100+L. sakei ELA204093+B. subtilis StrainA+Standard diet
[0304] 5. Chinook 5 (Test Product 5): B. velezensis StrainA+B. subtilis StrainB+L. curvatus ELA204100+Standard diet
[0305] 6. Negative Control Product: Standard diet
   The target dose range is shown calculated, per TP in Table 18 based on assayed CFU/g premix per Table 14 to Table 18.

TABLE 14
Test Product (TP) 1

| | Group identification |
|---|---|
| | TP1 |
| | Coded group name |
| | Group (G)1 |
| Description | Standard diet + B. amyloliquefaciens ELA191024 + B. |
| | subtilis ELA191105 + B. amyloliquefaciens ELA202071 |
| Probiotic strains | B. amyloliquefaciens ELA191024 + B. subtilis |
| | ELA191105 + B. amyloliquefaciens ELA202071 |
| Classification: | AAFCO/QPS, non-licensed |
| Target minimum dose | 1.63 × 10\hat{ }6 |
| rate (CFU/fish/day): | |
| Target minimum dose | 4.51 × 10\hat{ }7 |
| rate (CFU/fish BW/day): | |
| Formulation in 2436.6 g | 7.26 × 10\hat{ }10 CFUs total/1.058 g of spores/ |
| total of batch premix: | 2412 g corn starch/ 24.375 g SiO₂ |
| Assayed CFU/g of premix | 2.98 × 10\hat{ }7 |
| (total) | |
| Presentation and packaging: | White powder in 2 kg plastic canister |
| Storage: | Store in the original container. Keep the container |
| | tightly closed. Store between 4-15° C. in a dry place. |
| Lot identification: | To be included in study records |
| Expiration: | To be included in study records |

TABLE 15
Test Product (TP) 2

| | Group identification |
|---|---|
| | TP2 |
| | Coded group name |
| | Group (G)2 |
| Description | Standard diet + B. velezensis ELA204005 + B. subtilis |
| | ELA204016 + B. subtilis ELA191105 |
| Probiotic strains | B. velezensis ELA204005 + B. subtilis ELA204016 + |
| | B. subtilis ELA191105 |
| Classification: | AAFCO/QPS, non-licensed |
| Target minimum dose | 2.4 × 10\hat{ }6 CFUs/fish/day |
| rate (CFU/fish/day): | |
| Target minimum dose | 6.62 × 10\hat{ }7 |
| rate (CFU/fish BW/day): | |
| Formulation in 2434.3 g | 1.06 × 10\hat{ }11 CFUs total/3.756 g of spores/2409 g corn |
| total of batch premix: | starch/24.375 g SiO₂ |
| Assayed CFU/g of premix | 4.37 × 10\hat{ }7 |
| (total) | |
| Presentation and packaging: | White powder in 2 kg plastic canister |
| Storage: | Store in the original container. Keep the container |
| | tightly closed. Store between 4-15° C. in a dry place. |
| Lot identification: | To be included in study records |
| Expiration: | To be included in study records |

TABLE 16
Test Product (TP) 3

| | Group identification |
|---|---|
| | TP3 |
| | Coded group name |
| | Group (G)3 |
| Description | Standard diet + L. curvatus ELA204100 + L. sakei |
| | ELA204093 |
| Probiotic strains | L. curvatus ELA204100 + L. sakei ELA204093 |
| Classification: | AAFCO/QPS, non-licensed |
| Target minimum dose | 8.51 × 10\hat{ }7 |
| rate (CFU/fish/day): | |
| Target minimum dose | 2.35 × 10\hat{ }9 |
| rate (CFU/fish BW/day): | |
| Formulation in 2437.5 g | 3.78 × 10\hat{ }12 CFUs total/191.185 g lyophilized |
| total of batch premix: | Lactobacillus culture/24.375 g SiO₂ |
| Assayed CFU/g of premix | 1.55 × 10\hat{ }9 |
| (total) | |
| Presentation and packaging: | White powder in 2 kg plastic canister |
| Storage: | Store in the original container. Keep the container |
| | tightly closed. Store between 4-15° C. in a dry |
| | place. |
| Lot identification: | To be included in study records |
| Expiration: | To be included in study records |

TABLE 17
Test Product (TP) 4

| | Group identification |
|---|---|
| | TP4 |
| | Coded group name |
| | Group (G)4 |
| Description | Standard diet + L. curvatus ELA204100 + L. sakei |
| | ELA204093 + B. subtilis ELA191105 |
| Probiotic strains | L. curvatus ELA204100 + L. sakei ELA204093 + B. subtilis |
| | ELA191105 |
| Classification: | AAFCO/QPS, non-licensed |
| Target minimum dose rate | 2.47 × 10\hat{ }6 |
| (CFU/fish/day): | |
| Target minimum dose rate | 6.82 × 10\hat{ }7 |
| (CFU/fish BW/day): | |
| Formulation in 2437.3 g total | 1.01 × 10\hat{ }11 CFUs total/0.258 g of spores/191.185 g |
| of batch premix: | lyophilized Lactobacillus culture/24.375 g SiO₂ |
| Assayed CFU/g of premix | 4.5 × 10\hat{ }7 |
| (total) | |
| Presentation and packaging: | White powder in 2 kg plastic canister |
| Storage: | Store in the original container. Keep the container |
| | tightly closed. Store between 4-15° C. in a dry place. |
| Lot identification: | To be included in study records |
| Expiration: | To be included in study records |

TABLE 18
Test Product (TP) 5

| | Group identification |
|---|---|
| | TP5 |
| | Coded group name |
| | Group (G)5 |
| Description | Standard diet + B. velezensis ELA204005 + B. subtilis |
| | ELA204016 + L. curvatus ELA204100 |
| Probiotic strains | B. velezensis ELA204005 + B. subtilis ELA204016 + L. |
| | curvatus ELA204100 |
| Classification: | AAFCO/QPS, non-licensed |
| Target minimum dose rate | 2.09 × 10\hat{ }7 |
| (CFU/fish/day): | |
| Target minimum dose rate | 5.76 × 10\hat{ }8 |
| (CFU/fish BW/day): | |
| Formulation in 2434.5 g total | 9.25 × 10\hat{ }11 CFUs total/3.5 g of spores/78 g lyophilized |
| of batch premix: | Lactobacillus culture/24.375 g SiO₂ |
| Assayed CFU/g of premix | 3.8 × 10\hat{ }8 |
| (total) | |
| Presentation and packaging: | White powder in 2 kg plastic canister |
| Storage: | Store in the original container. Keep the container tightly |
| | closed. Store between 4-15° C. in a dry place. |
| Lot identification: | To be included in study records |
| Expiration: | To be included in study records |

TABLE 19

| | Group identification |
|---|---|
| | NCP |
| | Coded group name |
| | Group (G)1 |
| Description | Standard diet |
| Investigational | NA |
| Probiotic Product | |
| (IPP) name: | |
| IPP classification: | NA |
| IPP dose rate: | NA |
| IPP formulation: | NA |
| IPP presentation: | NA |
| IPP storage: | NA |
| IPP lot identification: | NA |
| IPP expiration: | NA |

### Treatment Preparation and Validation

[0306] Test diets will be formulated with probiotics by top coating the premix to the feed at an incorporation rate of approximately 750.0 g premix/10 kg feed. This inclusion rate considers the calculations and parameters described in Table 18, including an adjustment of SFR to 110% of expected rate during the treatment period to allow all fish opportunity to feed. Bodyweight is estimated to be ≈35-45 g on SD-1. Medicated (probiotic) diet preparation will be documented.

TABLE 20
Calculations for projected weekly SFR and dose rates over the study period. Minimum daily dose rates (in CFU/fish Bw/day)
are projected in Study Weeks 4 and 5. Dose rate calculations consider the assayed CFU/g premix per Table 14 to Table 18.

| | | | Phase 1 | | | | | Phase 2 | | | | |
|---|---|---|---|---|---|---|---|---|---|---|---|---|
| | | | Medicated period + Water T° increase (Week 6) + SRS Challenge | | | | | | | | | |
| | | Week | Week | Week | Week | Week | Week | Week | Week | Week | Week | Week |
| | | 0 | 1 | 2 | 3 | 4 | 5 | 6 | 7 | 8 | 9 | 10 |
| % Specific | | 100% | 100% | 100% | 100% | 100% | 100% | 100% | 100% | 100% | 100% | 100% |
| growth | | | | | | | | | | | | |
| rate (SGR) | | | | | | | | | | | | |
| Initial | | 30.0 | 34.7 | 40.0 | 45.9 | 52.52 | 59.8 | 68.0 | 79.04 | 92.8 | 108.0 | 125.3 |
| weight (g) | | | | | | | | | | | | |
| Average | | 32.3 | 37.3 | 42.9 | 49.2 | 56.1 | 63.9 | 73.5 | 85.9 | 100.4 | 116.6 | 135.0 |
| weight (gr) | | | | | | | | | | | | |
| Final | | 34.7 | 40.0 | 45.9 | 52.5 | 59.77 | 68.0 | 79.0 | 92.8 | 108.01 | 125.3 | 144.7 |
| weight (g) | | | | | | | | | | | | |
| Temp. (° C.) | | 11.0 | 11.0 | 11.0 | 11.0 | 11.0 | 11.0 | 13.0 | 15.0 | 15.0 | 15.0 | 15.0 |
| Specific feed | | 2.06 | 2.06 | 1.93 | 1.93 | 1.84 | 1.84 | 2.14 | 2.29 | 2.16 | 2.11 | 2.05 |
| rate (SFR; | | | | | | | | | | | | |
| % Bw/day) | | | | | | | | | | | | |
| 110% SFR | | 2.27 | 2.27 | 2.12 | 2.12 | 2.02 | 2.02 | 2.35 | 2.52 | 2.38 | 2.32 | 2.26 |
| Fish | | 1.615 | 1.865 | 2.145 | 2.46 | 2.805 | 3.195 | 3.675 | 4.295 | 5.02 | 5.83 | 6.75 |
| biomass/tank | | | | | | | | | | | | |
| (kg) | | | | | | | | | | | | |
| Feed/tank/day | | 0.037 | 0.042 | 0.045 | 0.052 | 0.057 | 0.065 | 0.086 | 0.108 | 0.119 | 0.135 | 0.153 |
| (kg) | | | | | | | | | | | | |
| Feed/fish/day | | 0.732 | 0.847 | 0.909 | 1.043 | 1.133 | 1.291 | 1.727 | 2.165 | 2.390 | 2.705 | 3.051 |
| (g) | | | | | | | | | | | | |
| Projected | TP1 | NA | 1.89E+06 | 2.03E+06 | 2.33E+06 | 2.53E+06 | 2.88E+06 | 3.86E+06 | 4.84E+06 | 5.34E+06 | 6.04E+06 | 6.82E+06 |
| dose | TP2 | | 2.77E+06 | 2.98E+06 | 3.42E+06 | 3.71E+06 | 4.23E+06 | 5.66E+06 | 7.09E+06 | 7.83E+06 | 8.86E+06 | 9.99E+06 |
| (CFU/ | TP3 | | 9.84E+07 | 1.06E+08 | 1.21E+08 | 1.32E+08 | 1.50E+08 | 2.01E+08 | 2.52E+08 | 2.78E+08 | 3.14E+08 | 3.55E+08 |
| fish/day) | TP4 | | 2.86E+06 | 3.07E+06 | 3.52E+06 | 3.82E+06 | 4.36E+06 | 5.83E+06 | 7.31E+06 | 8.06E+06 | 9.13E+06 | 1.03E+07 |
| | TP5 | | 2.41E+07 | 2.59E+07 | 2.97E+07 | 3.23E+07 | 3.68E+07 | 4.92E+07 | 6.17E+07 | 6.81E+07 | 7.71E+07 | 8.70E+07 |
| Projected | TP 1 | NA | 5.07E+07 | 4.74E+07 | 4.74E+07 | 4.51E+07 | 4.51E+07 | 5.25E+07 | 5.63E+07 | 5.32E+07 | 5.18E+07 | 5.05E+07 |
| dose | TP 2 | | 7.43E+07 | 6.94E+07 | 6.94E+07 | 6.62E+07 | 6.62E+07 | 7.70E+07 | 8.25E+07 | 7.79E+07 | 7.60E+07 | 7.40E+07 |
| (CFU/ | TP 3 | | 2.64E+09 | 2.46E+09 | 2.46E+09 | 2.35E+09 | 2.35E+09 | 2.73E+09 | 2.93E+09 | 2.77E+09 | 2.70E+09 | 2.63E+09 |
| fish | TP 4 | | 7.66E+07 | 7.16E+07 | 7.16E+07 | 6.82E+07 | 6.82E+07 | 7.93E+07 | 8.51E+07 | 8.03E+07 | 7.83E+07 | 7.63E+07 |
| Bw/day; | TP 5 | | 6.47E+08 | 6.04E+08 | 6.04E+08 | 5.76E+08 | 5.76E+08 | 6.70E+08 | 7.18E+08 | 6.78E+08 | 6.61E+08 | 6.44E+08 |
| CFU/kg) | | | | | | | | | | | | |

[0307] A pilot scale mixer will be used for preparation of the 5 test diets (TP1, TP2, TP3, TP4 and TP5) in a 10 kg batch size as per the recipe outlined in Table 21. Medicated feed will be prepared with two feed pellet sizes: Nutra Supreme HE 30 and Nutra Supreme HE 60, which will be delivered according to fish size (Nutra Supreme HE 30 will be delivered when fish are weighing up to approximately 60 g average Bw, and Nutra Supreme HE 60, when fish are over 60 g), and will be prepared in equal way. Medicated feed will be prepared using the recipe identified in 3 phases as follows:
[0308] 1—Feed and premix mix for 30 seconds (dry mixing)
[0309] 2—Fish oil addition over 30 seconds, no more than 0.5% oil
[0310] 3—Keep mixing for another 60 seconds (wet mixing)

TABLE 21
Test diet recipes, per 10 kg batch size

| | Diet | | | Oil | Batch |
|---|---|---|---|---|---|
| Group | name | Feed (g) | Probiotic premix (g) | (g) | total (g) |
| TP1 | Diet 1 | 9,150 | 750 g (2.23 × 10\hat{ }10 | 100 | 10,000 |
| | | | CFUs total) | | |
| TP2 | Diet 2 | 9,150 | 750 g (3.28 × 10\hat{ }10 | 100 | 10,000 |
| | | | CFUs total) | | |
| TP3 | Diet 3 | 9,150 | 750 g (1.16 × 10\hat{ }12 | 100 | 10,000 |
| | | | CFUs total) | | |
| TP4 | Diet 4 | 9,150 | 750 g (3.38 × 10\hat{ }10 | 100 | 10,000 |
| | | | CFUs total) | | |
| TP5 | Diet 5 | 9,150 | 750 g (2.85 × 10\hat{ }11 | 100 | 10,000 |
| | | | CFU total) | | |
| NCP | Diet 6 | 9,900 | — | 100 | 10,000 |

[0311] One hundred grams duplicated feed samples are collected from each batch of medicated feed and recorded on CRF ‘Medicated feed preparation’. Samples are collected by the Clinical Investigator and stored frozen at −20° C. in airtight-labeled plastic bags for future analysis.

### Treatment Administration

[0312] During acclimation fish will be fed a commercially available and complete unmedicated commercial salmonid diet of the same pellet size and approximate composition as the negative control diet, provided by Skretting.

[0313] During medication periods phase 1 & 2, Fish will be fed approximately 110% of the specific feed rate (SFR) identified using a Skretting feed table (projected per Table 20). Exploratory weight sampling will be performed approximately every 14 days and will be registered on the CRF ‘Weight sampling’. Average bodyweights will allow adjusting feed amounts to be delivered to each tank.

[0314] Medicated feed quantity will be calculated for 14 days and thereafter be pre-weighed for assuming a constant daily SFR over the administration period, and stored in labelled plastic bags with date, group and tank identification.

[0315] Exploratory weight sampling will be performed approximately every 14 days. Average Body weights will allow adjusting feed amounts to be delivered to each tank and every 7 days feed will be calculated based on projected body weight.

### Body Weight and Length Assessments

[0316] Body weight data will be recorded from individual anaesthetized fish on tank set up, SD-1, SD40 and at the end of study, the survivors. Weigh scales will be calibrated on each day prior to use. The length (nose to fork length) will be recorded in all sampled fish and survivors.

### Sample Preparation for Microbiome and Metabolomics

### Profiling

[0317] For the gut samples destined to microbiome and metabolomic profiling, an incision to the ventral surface of the fish will be made to expose and then incise the gut. Any feces remaining within the hindgut will be manually removed using paper towel. Whole gut samples will be collected using disposable or sterilized forceps and placed in sterile whirlPak bags, then stored at −20 C. To minimize cross-contamination, processing of samples will use disposable equipment whenever possible and new or cleaned equipment will be used for each fish. Non-disposable items will be cleaned by washing with a detergent then a strong organic solvent (e.g. ethanol, acetone) between samples. Fresh disposable gloves and disposable scalpels will be used for each fish and the necropsy surface cleaned between animals. Each fish will be processed and samples collected individually with care to maintain CID to the various samples as they are taken.

### Assessment of Efficacy

[0318] During the challenge period of the study, any moribund fish that reach a humane endpoint (as described below) will be removed from a tank, euthanized, and counted as a mortality. A fish is selected for humane endpoint if any of the two following criteria is observed:
[0319] Criterion 1: Fish is in lateral-recumbency, dorsolateral-recumbency, or dorsalrecumbency on the bottom of the tank or floating at the water surface.
[0320] Criterion 2: Fish is unable to achieve or maintain a normal orientation for a salmonid in the water column.

[0321] Any mortality or terminally moribund fish noticed during the challenge observation period will be removed from the tank; will be recorded on CRF ‘Necropsy’ and assigned an increasing and sequentially numbered case identification number (CID), beginning with ‘1’. Mortalities and moribund fish will be noted as ‘M’, while survivors will be noted as ‘S’. An evaluation of clinical signs of SRS will be documented for all challenged fish (mortalities and survivors).

[0322] Clinical signs of SRS include one or more of the following observations: abdominal swelling, pale gills, petechial and ecchymotic haemorrhages on the fin bases, skin ulceration, subcapsular grey/yellow mottled liver coloration, small ring shaped foci of the liver, and yellowish mucous filled intestines (Rozas and Enríquez, 2014).

[0323] The SRS Indirect Immunofluorescence Antibody Test (SRS-IFAT) will be used for mortality confirmation in the efficacy assessment. Samples of the posterior kidney will be collected by inserting a first use loop into the tissue to prepare a smear on a glass slide. Samples for IFAT will be delivered and further processed by the Diagnostic Laboratory (at Puerto Varas Study Site) as soon as possible. Samples that cannot be processed on the same day will be stored at 6±4° C. and processed as soon as possible. All samples delivered to the Diagnostic Laboratory will be recorded on CRF ‘Derivation of sample’. For a mortality to be considered specific for SRS, at least one of the above clinical signs should be observed and/or the posterior kidney should be positive in the SRS-IFAT.

### Definition of Efficacy

[0324] TP efficacy will be defined as meeting one or more of the following criteria:

[0325] 1. Relative improvement of bodyweight and growth parameters including but not limited to Weight Gain Ratio (WGR) and Specific Growth Rate (SGR), of the TP in comparison to the NCP. Calculations may consider the following periods: Phase I, Phase II and the combination of Phase I+II.

[0326] 2. Improvement in survival of the TP in comparison to the NCP. Calculations may consider the following periods: Phase I, Phase II and the combination of Phase I+II.

[0327] 3. A negative association of Absolute Risk Reduction (ARR) between the TP and fish mortality/signs of disease. Calculations may consider the following periods: Phase I, Phase II and the combination of Phase I+II. Mortalities and moribund fish will be used to calculate the ARR

### Piscirickettsia Challenge Assessment

### Preparation

[0328] Briefly, isolate AT17-209 will be thawed from frozen stocks of challenge seed and cultured in the Chinook salmon embryo cell line CHSE-214 with either minimum essential medium (MEM) or L-15 maintenance medium, with the addition of 10% fetal bovine serum (FBS) and without antibiotics, until a cytopathic effect (CPE) of 80-90% is obtained, according to SOP ‘Infección de células con un patógeno intracelular’. For the Challenge of Phase 2 in the efficacy assessment, the challenge material to be used will be defined based on the challenge model, targeting a minimum of 20-40% of SRS-specific mortality.

### Administration and Dosing

[0329] No more than seven days prior to beginning a challenge, a bulk average weight of the fish will be determined. Correct needle size for challenge injections will be determined by euthanizing a few fish and checking needle length required to deliver an i.p. injection. Groups of fish will be netted into an anesthetic bath, and once anesthetized, removed from the bath and i.p. injected one pelvic fin length anterior to the pelvic girdle on the ventral mid-line with 0.1 ml of challenge material and finally returned to their holding tank. Challenge administration details will be recorded.

### Description of Statistical Methods and Calculations

[0330] The tank will be the experimental unit and fish will be the observational unit. Variable calculations and statistical analyses will be performed for individual phases and the overall study. Growth performance variables may include but are not limited to Weight Gain Ratio (WGR) and Specific Growth Rate (SGR). The effect of treatment on growth performance variables will be analyzed using a one-way analysis of variance. All pairwise comparisons will be evaluated using a two-tail student's t-test. Differences in survival between treatments will be evaluated using Kaplan-Meier analysis. Mortality may also be evaluated using a mixed model procedure, assuming a binomial distribution and logit link. Analyses will be performed using JMP version 14.0 or higher (SAS Institute, Inc. Cary NC).

### Example 10

### Effect of Dietary Supplementation of Lactobacillus Probiotics on Growth Performance, Immune Response, Antioxidant Properties of Atlantic Salmon

[0331] Disease outbreaks cause tremendous losses to the salmonid farming industry and have become a major constraint for modern salmon farming. For microbial pathogens, there is an industry effort towards antibiotic reduction due to emergence of antibiotic-resistant bacteria and in line with best practice usage evolving across farm animal species. Probiotics are a viable, eco-friendly alternative to antibiotics. Probiotics are live microorganisms which when administered in adequate amounts confer a health benefit on the host. Originally introduced to control diseases in aquaculture, the use of probiotics has been extended to improve weight gain and performance. In aquaculture, probiotics contribute to disease prevention through competitive exclusion of pathogenic bacteria, production of antimicrobial molecules and enhancing the host immune system, which is one of the most purported benefits of using probiotics in aquaculture. The ability of probiotics to produce various digestive enzymes (better nutrient digestibility) and improve gut health (better nutrient absorption) may contribute to improved feed conversion ratio and weight gain.

[0332] In the proposed study design, we evaluate the effect of dietary supplementation of Lactobacillus probiotics on growth performance, immune response, and antioxidant properties.

[0333] This pilot study design is selected to minimize animal numbers while controlling for tank effect and variation due to individual fish feeding behavior.

[0334] Four probiotic candidates (four strains of Lactobacillus) are evaluated in two combinations (TP1 and TP2) compared to a negative control, to determinate their effect on growth performance, immune response, and antioxidant properties.

[0335] Five hundred and eighty-five (585), plus 60 extra fish (at 10%, totaling 645) will be selected for inclusion to the study during this process per the defined inclusion criteria, which includes a set bodyweight range. On day-7, all fish will be anaesthetized and individually weighed. Included fish will be distributed without intentional bias in fifteen study tanks (43 fish per tank) randomly allocated to 3 groups with 5 replicate tanks for each group (see table 22 and FIG. 15A). Study fish will be offered unmedicated diet post-handling. One hundred and fifty fish (50 per group and 10 per tank) will be lengthened.

[0336] Post inclusion and study tank set up; study fish will be acclimated for a minimum of 5 days without handling. To understand the baseline microbiome and immune parameters before treating with probiotics, 10 samples (2 samples per tank) per group will be collected and combined from all groups on study day (SD)-1. The remaining 41 fish per tank will be anaesthetized then individually weighed. Fish bodyweights from SD-1 will be used to forecast and calculate the specific feed rate of the test diets with target minimum dose rates over the study period.

[0337] The administration of the test diets will begin in the study tanks on SD 0, for a period of 84 days, or until fish weight average raise up to 125 grams, as established as a limit of biomass feasible to keep under proper conditions for the 100 L tanks. To avoid a high density at the end period of the study, the number of fish per tank can be decreased on the discretion of the Investigator, based on the following parameters: an increase of more than 48 Kg/m³ per tank and/or; fish reach an average weight higher than 125 grams. The objective of this is to ensure proper continuity of the study by completing the period of 10 weeks (as minimum) and to reach the goal of 12 weeks. In case that number are decreased, equal number per tank will be applied. A minimum number of 32 fish per tank should be considered to respect to reach at the end of the study, in order to keep statistical validation (the minimum difference may vary to 7 grams between different groups). Depopulated fish will be euthanized to be weighed and measured its length.

[0338] To understand the effect of probiotics on the microbiome and immune parameters, 10 samples per treatment (2 samples per tank) will be collected at day 35 and 20 samples per treatment (4 samples per tank) will be collected at the end of the study period (SD84). In addition, at SD84 all fish will be euthanized with an anesthetic overdose and will be weighted and lengthened (FIG. 15B).

TABLE 22
Tabular overview of treatment groups. Tank replicates are indicated
by letters ‘A to E’, ‘F to J’ and ‘K to O’.

| Study | Group | Replicate | | No. of |
|---|---|---|---|---|
| Tank ID | identification | identification | Treatment description | fish |
| 1 | TP 1 | A | Standard diet + L. curvatus ELA204100 + | 43 |
| | | | L. curvatus ELA204093. | |
| 2 | TP 1 | B | Standard diet + L. curvatus ELA204100 | 43 |
| | | | L. curvatus ELA204093. | |
| 3 | TP 1 | C | Standard diet + L. curvatus | 43 |
| | | | ELA204100 + L. curvatus | |
| | | | ELA204093. | |
| 4 | TP 1 | D | Standard diet + L. curvatus ELA204100 + | 43 |
| | | | L. curvatus ELA204093 | |
| 5 | TP 1 | E | Standard diet + L. curvatus ELA204100 + | 43 |
| | | | L. curvatus ELA204093. | |
| 6 | TP 2 | F | Standard diet + L. curvatus ELA214388 + | 43 |
| | | | L. sakei ELA214391 | |
| 7 | TP 2 | G | Standard diet + L. curvatus ELA214388 + L. | 43 |
| | | | sakei ELA214391 | |
| 8 | TP 2 | H | Standard diet + L. curvatus ELA214388 + L. | 43 |
| | | | sakei ELA214391 | |
| 9 | TP 2 | I | Standard diet + L. curvatus ELA214388 + L. | 43 |
| | | | sakei ELA214391 | |
| 10 | TP 2 | J | Standard diet + L. curvatus ELA214388 + L. | 43 |
| | | | sakei ELA214391 | |
| 11 | NCP | K | Standard diet | 43 |
| 12 | NCP | L | Standard diet | 43 |
| 13 | NCP | M | Standard diet | 43 |
| 14 | NCP | N | Standard diet | 43 |
| 1 | N | O | Standard diet | 43 |

TP—Test Product;
NCP—Negative Control Product

[0339] Schedule of the study—A tentative outline of important study events is given in Table 23 for the milestones of the study including the in vivo events; calendar dates and weeks are subject to change without study amendment and will be documented in the study master file (SMF).

TABLE 23
Proposed schedule of in vivo study events. Calendar dates
will vary with fish growth and will be reported in the FSR.

| Study Day | |
|---|---|
| (±2 days) | Study Activity |
| Prior to | Health assessment, fish pre-inclusion. |
| Study | |
| −7 | 645 fish will be enrolled and distributed in fifteen 100 L tanks |
| | (43 fish per tank). All fish will be individually weighed (100% |
| | population) and 10 fish per tank will be measured for length. |
| −7 to 0 | Acclimation; Tank randomization. |
| | Weight sampling: all fish will be individually weighed |
| | (100% population). |
| −1 | Sample collection: 2 fish per tank will be euthanized and |
| | sampled (blood and gut samples). |
| All Study | Record daily observations. |
| Days 0-84 | Sample weight each two weeks for feeding rate calculation |
| | (10 fish per tank). |
| | Study diets will be delivered from SD 0 until end of trial. |
| 35 | Sample collection: 10 fish per treatment will be euthanized, |
| | weighted and sampled for blood and gut samples. |
| 84 | All fish will be individually measured and weighed (100% |
| | population, euthanized). |
| | Sample collection: 20 fish per treatment (4 per tank) |
| | will be anesthetized and euthanized for blood and gut |
| | samples. |

Day 0 is defined as the beginning of Test products (TPs).

### Experimental Fish and Rearing Conditions

### Experimental Animal Description

[0340] Atlantic salmon recruited to the study will be from laboratory stock maintained at the Aquarium Facility. Animal identification is summarized in Table 23. Disease and treatment history will be recorded.

TABLE 23
Summary of animal identification for Atlantic
salmon recruited to the study.

| | Probiotic performance evaluation |
|---|---|
| Species: | Atlantic salmon |
| Fish Size: | Approximately 35 g [30-40 g] at Day 0; No fish below |
| | 30 g will be included at day 0. |
| Origin: | 2020_10_OV4AQG |
| Age: | Parr |
| Gender: | Mixed |
| Number: | 645 fish to be enrolled to the study. |
| Physiological | Clinically normal pre-smolts. |
| status: | |
| Pre-treatment: | Not applicable. |

### Animal Housing and Management

[0341] Over the study period, fish will be maintained in 100 L tanks of flow through fresh water under a photoperiod regime of 24-hour day light. Water flow during the holding period and during experimental period will be set at a rate to ensure a minimum of 2.0 total volume water exchange/hour. If required, supplemental oxygen will be delivered to the tank water to maintain appropriate saturated oxygen levels (70-130% saturation). Water temperature for all tanks will be recorded daily. Temperature will be maintained at 11.0±1.0° C. during the whole study.

### Animal Selection and Identification

[0342] A single pre-study assessment will occur on approximately SD-7. No individual tagging or identification will be undertaken in this study.

### Inclusion to Study

[0343] Before SD-7, tank populations under consideration for the study will be screened for pre-inclusion to the study and a pre-study health declaration will be completed using the CRF ‘Fish health declaration’. If more than 645 animals are eligible for enrollment, only the first 645 eligible animals assessed will be enrolled. Only fish meeting the criteria will be anaesthetized and assessed on SD-7. Participating fish must be:
[0344] Deemed by the Clinical Investigator and/or AV to be clinically healthy, sexually immature and without apparent deformities.
[0345] Average weight 33-37 g.
[0346] Data will be recorded

### Exclusion

[0347] In addition to the conditions above in inclusion, the following criteria will exclude individual fish prior to study:
[0348] Sick, weak, or stressed fish
[0349] Fish with visible signs of damage to the skin or mucous layer #Fish weighing less than 30 grams or exceeding 42 grams on SD 0.

### Post-Inclusion Removal (Withdrawal)

[0350] For any tank classification if either study treatment or observations are discontinued, the reason will be reported directly to the Investigator and noted using the CRF ‘Note to file’. The reasons could include:
[0351] Concomitant disorders that may interfere with the evaluation of response to treatment; at the discretion of the Clinical Investigator in consultation with the Sponsor's Representative (SR) and/or Study Advisors (SA).
[0352] The need to remove live animals affected by an adverse event (AE) will be made on an individual case basis by the Clinical Investigator in consultation with the SR/SAs.
[0353] Protocol deviation(s) that compromise integrity of the study.

### Acclimization and Study Tank Set Up

[0354] After inclusion to the study, fish will be allocated to study tanks as part of the handling inclusion process without intentional bias and acclimated per normal site husbandry.

[0355] Post study tank set up; fish will be acclimated for at least seven days before they are re-handled. Otherwise, animals will be maintained per normal husbandry procedures.

### Test Products

[0356] Two Test Products (TPs) will be assessed, each consisting of fish feed prepared with spores of Lactobacillus as follows:
[0357] 1. Chinook 1 (Test Product 1): Standard diet+L. curvatus ELA204100+L. curvatus ELA204093.
[0358] 2. Chinook 2 (Test Product 2): Standard diet+L. curvatus ELA214388+L. sakei ELA214391
[0359] 3. Negative Control Product: Standard diet

[0360] The target dose range is shown calculated, per TP in Table 20. Calculations for projected weekly SFR and dose rates over the study period. Minimum daily dose rates (in CFU/fish Bw/day) are projected in Study Weeks 4 and 5. Dose rate calculations consider the assayed CFU/g premix per Table 24 and 25. DoseRE PROJMinim based on assayed CFU/g premix per tables 24 and 25.

TABLE 24
Test Product 1 (TP1)

| | Group identification |
|---|---|
| | TP1 |
| | Coded group name |
| | Group (G)1 |
| Description | Standard diet + L. curvatus ELA204100 + L. |
| | curvatus ELA204093 |
| Probiotic strains | L. curvatus ELA204100 + L. curvatus ELA204093 |
| Classification: | AAFCO/QPS, non-licensed |
| Target minimum dose rate | 8.51 × 10\hat{ }7 |
| (CFU/fish/day): | |
| Target minimum dose rate | 2.35 × 10\hat{ }9 |
| (CFU/fish BW/day): | |
| Formulation in 3527 g total | 4.44 × 10\hat{ }12 CFUs total/578 g lyophilized Lactobacillus |
| of batch premix: | culture/24.375 g SiO₂ |
| Assayed CFU/g of premix | 1.26 × 10\hat{ }9 |
| (total) | |
| Presentation and packaging: | White powder in 2 kg plastic canister |
| Storage: | Store in the original container. Keep the container tightly |
| | closed. Store between 4-15° C. in a dry place. |
| Lot identification: | To be included in study records |
| Expiration: | To be included in study records |

TABLE 25
Test Product 1 (TP2)

| | Group identification |
|---|---|
| | TP2 |
| | Coded group name |
| | Group (G)2 |
| Description | Standard diet + L. curvatus ELA214388 + L. |
| | sakei ELA214391 |
| Probiotic strains | L. curvatus ELA214388 + L. sakei ELA214391 |
| Classification: | AAFCO/QPS, non-licensed |
| Target minimum dose rate | 8.51 × 10\hat{ }7 |
| (CFU/fish/day): | |
| Target minimum dose rate | 2.35 × 10\hat{ }9 |
| (CFU/fish BW/day): | |
| Formulation in 3527 g total | 4.31 × 10\hat{ }12 CFUs total/831 g lyophilized Lactobacillus |
| of batch premix: | culture/24.375 g SiO₂ |
| Assayed CFU/g of premix | 1.21 × 10\hat{ }9 |
| (total) | |
| Presentation and packaging: | White powder in 2 kg plastic canister |
| Storage: | Store in the original container. Keep the container tightly |
| | closed. Store between 4-15° C. in a dry place. |
| Lot identification: | To be included in study records |
| Expiration: | To be included in study records |

TABLE 26
Negative Control Product

| | Group identification |
|---|---|
| | NCP |
| | Coded group name |
| | Group (G)1 |
| Description | Standard |
| | diet |
| Investigational | |
| Probiotic Product | NA |
| (IPP) name: | |
| IPP classification: | NA |
| IPP dose rate: | NA |
| IPP formulation: | NA |
| IPP presentation: | NA |
| IPP storage: | NA |
| IPP lot identification: | NA |
| IPP expiration: | NA |

### Treatment Preparation and Validation

[0361] Test diets will be formulated with probiotics by top coating the premix to the feed at an incorporation rate of approximately 500.0 g premix/10 kg feed. This inclusion rate considers the calculations and parameters described in Table 27 including an adjustment of SFR to 110% of expected rate during the treatment period to allow all fish opportunity to feed. Bodyweight is estimated to be ≈30-40 g on SD-1. Medicated (probiotic) diet preparation will be documented. Feed preparation as NCP or TP diets (‘Study Diets’): The same manufacturer provided, complete pelleted diet for salmon will be used as a base to prepare the NCP and the two TP diets. The respective probiotic candidates will be mixed with fish oil and sprayed onto the feed and dried at room temperature and stored at 4° C. The NCP will likewise be mixed with fish oil sprayed into the feed (but no probiotic), dried at room temperature, and stored per the TP. The NCP diet will be prepared first, prior to the TP diets.

TABLE 27
Calculations for projected weekly SFR and dose rates over the study period.
Minimum daily dose rates (in CFU/fish Bw/day) are projected in Study Weeks
4 and 5. Dose rate calculations consider the assayed CFU/g premix.

| | | Medicated Period | | | | | | |
|---|---|---|---|---|---|---|---|---|
| | | Week −1 | Week 1 | Week 2 | Week 3 | Week 4 | Week 5 | Week 6 |
| % Specific | | 100% | 100% | 100% | 100% | 100% | 100% | 100% |
| growth rate | | | | | | | | |
| (SGR) | | | | | | | | |
| Initial | | 31.0 | 35.8 | 41.4 | 47.4 | 54.3 | 61.8 | 69.9 |
| weight (g) | | | | | | | | |
| Average | | 33.4 | 38.6 | 44.4 | 50.8 | 58.0 | 65.8 | 74.6 |
| weight (gr) | | | | | | | | |
| Final | | 35.8 | 41.4 | 47.4 | 54.3 | 61.8 | 69.9 | 79.2 |
| weight (g) | | | | | | | | |
| Temp. (° C.) | | 10.8 | 10.8 | 10.8 | 10.8 | 10.8 | 10.8 | 10.8 |
| Specific feed | | 1.90 | 1.90 | 1.80 | 1.80 | 1.70 | 1.70 | 1.60 |
| rate (SFR; % | | | | | | | | |
| Bw/day) | | | | | | | | |
| 110% SFR | | 2.05 | 2.05 | 1.92 | 1.92 | 1.83 | 1.76 | 1.76 |
| Fish | | 1426 | 1549 | 1758 | 1987 | 2239 | 2516 | 2820 |
| biomass/ | | | | | | | | |
| tank (g) | | | | | | | | |
| Feed/tank/ | | 27 | 29 | 32 | 36 | 38 | 43 | 45 |
| day | | | | | | | | |
| (kg) | | | | | | | | |
| Feed/fish/day | | 0.6 | 0.7 | 0.8 | 0.9 | 0.9 | 1.0 | 1.2 |
| (g) | | | | | | | | |
| Projected | TP1 | 3.78E+07 | 4.41E+07 | 5.04E+07 | 5.67E+07 | 5.67E+07 | 6.30E+07 | 7.56E+07 |
| dose | TP2 | 3.63E+07 | 4.24E+07 | 4.84E+07 | 5.45E+07 | 5.45E+07 | 6.05E+07 | 7.26E+07 |
| (CFU/ | | | | | | | | |
| fish/day) | | | | | | | | |
| Projected | TP 1 | 1.13E+09 | 1.14E+09 | 1.14E+09 | 1.12E+09 | 9.78E+08 | 9.57E+08 | 1.01E+09 |
| dose | TP 2 | 1.09E+09 | 1.10E+09 | 1.09E+09 | 1.07E+09 | 9.39E+08 | 9.19E+08 | 9.73E+08 |
| (CFU/ | | | | | | | | |
| fish | | | | | | | | |
| Bw/day; | | | | | | | | |
| CFU/kg) | | | | | | | | |

| | | Medicated Period | | | | | |
|---|---|---|---|---|---|---|---|
| | | Week 7 | Week 8 | Week 9 | Week 10 | Week 11 | Week 12 |
| % Specific | | 100% | 100% | 100% | 100% | 100% | 100% |
| growth rate | | | | | | | |
| (SGR) | | | | | | | |
| Initial | | 79.2 | 89.3 | 100.4 | 112.2 | 125.4 | 139.8 |
| weight (g) | | | | | | | |
| Average | | 84.2 | 94.8 | 106.3 | 118.8 | 132.6 | 147.5 |
| weight (gr) | | | | | | | |
| Final | | 89.3 | 100.4 | 112.2 | 125.4 | 139.8 | 155.3 |
| weight (g) | | | | | | | |
| Temp. (° C.) | | 10.8 | 10.8 | 10.8 | 10.8 | 10.8 | 10.8 |
| Specific feed | | 1.54 | 1.50 | 1.50 | 1.46 | 1.43 | 1.40 |
| rate (SFR; % | | | | | | | |
| Bw/day) | | | | | | | |
| 110% SFR | | 1.70 | 1.65 | 1.61 | 1.57 | 1.52 | 1.48 |
| Fish | | 2994 | 3331 | 3700 | 4104 | 4541 | 5011 |
| biomass/ | | | | | | | |
| tank (g) | | | | | | | |
| Feed/tank/ | | 46 | 50 | 55 | 60 | 65 | 70 |
| day | | | | | | | |
| (kg) | | | | | | | |
| Feed/fish/day | | 1.2 | 1.3 | 1.4 | 1.5 | 1.7 | 1.8 |
| (g) | | | | | | | |
| Projected | TP1 | 7.56E+07 | 8.19E+07 | 8.82E+07 | 9.45E+07 | 1.07E+08 | 1.13E+08 |
| dose | TP2 | 7.26E+07 | 7.87E+07 | 8.47E+07 | 9.08E+07 | 1.03E+08 | 1.09E+08 |
| (CFU/ | | | | | | | |
| fish/day) | | | | | | | |
| Projected | TP 1 | 8.98E+08 | 8.64E+08 | 8.30E+08 | 7.95E+08 | 8.08E+08 | 7.69E+08 |
| dose | TP 2 | 8.62E+08 | 8.30E+08 | 7.97E+08 | 7.64E+08 | 7.76E+08 | 7.38E+08 |
| (CFU/ | | | | | | | |
| fish | | | | | | | |
| Bw/day; | | | | | | | |
| CFU/kg) | | | | | | | |

[0362] A pilot scale mixer will be used for preparation of the 2 test diets (TP1 and TP2) in a 10 kg batch size as per the recipe outlined in Table 28.

[0363] Medicated feed will be prepared with two feed pellet sizes: Nutra Supreme 30 and Nutra Supreme 60, which will be delivered according to fish size (Nutra Supreme 30 will be delivered when fish are weighing up to approximately 60 g average Bw, and Nutra Supreme 60, when fish are over 60 g), and will be prepared in equal way. At least three batches are considered to prepare for the whole study period, based on the required feed calibers. Medicated feed will be prepared using the recipe identified in 3 phases as follows:
[0364] 1—Feed and premix mix for 30 seconds (dry mixing)
[0365] 2—Fish oil addition over 30 seconds, no more than 0.5% oil
[0366] 3—Keep mixing for another 60 seconds (wet mixing).

TABLE 28
Test diet recipes, per 10 kg batch size

| | Diet | Feed | | Oil | Batch |
|---|---|---|---|---|---|
| Group | name | (g) | Probiotic premix (g) | (g) | total (g) |
| TP1 | Diet 1 | 9,400 | 500 g (6.29 × 10\hat{ }11 CFUs | 100 | 10,000 |
| | | | total) | | |
| TP2 | Diet 2 | 9,400 | 500 g (6.05 × 10\hat{ }11 CFUs | 100 | 10,000 |
| | | | total) | | |
| NCP | Diet 3 | 9,900 | — | 100 | 10,000 |

### Treatment Administration

[0367] During acclimation fish will be fed a commercially available and complete unmedicated commercial salmonid diet of the same pellet size and approximate composition as the negative control diet, provided by Skretting.

[0368] During medication period, fish will be fed approximately 110% of the specific feed rate (SFR) identified using a Skretting feed table. Calculations for projected weekly SFR and dose rates over the study period. Minimum daily dose rates (in CFU/fish Bw/day) are projected in Study Weeks 4 and 5. Dose rate calculations consider the assayed CFU/g premix per Table 27 and 28.

[0369] Exploratory weight sampling will be performed approximately every 14 days (10 fish per tank) and will be registered. Average body weights will allow adjusting feed amounts to be delivered to each tank and every 7 days feed will be calculated based on projected body weight.

[0370] Medicated feed quantity will be calculated for 14 days and thereafter be pre-weighed for assuming a constant daily SFR over the administration period, and stored in labelled plastic bags with date, group and tank identification.

### Body Weight and Length Assessments

[0371] Body weight data will be recorded from individual anaesthetized fish on tank set up, SD-1, SD 35 and at the end of study (SD84). Weigh scales will be calibrated on each day prior to use. This information will be recorded. The length (nose to fork length) will be recorded in all sampled fish and survivors.

### Sample Collection Schedule

[0372] Over the study period, fish will be sampled for data and tissue collection as Table 28.

TABLE 28
Overview of fish procedures and sampling schedule.

| | Approximate Study Day | | | |
|---|---|---|---|---|
| | −7 | −1 | 35 | 84 |
| Sample type | Tank | Before Start | Medicated feed phase | |
| | set up | Medicated Feed | | |
| | & fish | | | |
| | selection | | | |
| Body weight | ✓ 100% | ✓ 100% fish | ✓ 10 fish | ✓ 100% fish |
| | fish | | per tank | |
| Collection | — | ✓ 2 fish | ✓2 fish | ✓ 4 fish |
| of Tissue | | per tank | per tank | per tank * |
| and Blood | | | | |
| samples | | | | |
| Euthanasia | — | — | — | ✓ 100% fish |

* May be assessed up to two days.

### Assessment of Efficacy

[0373] During the study period, in case that any moribund fish reach a humane endpoint (as described below) will be removed from a tank, euthanized, and counted as a mortality. A fish is selected for humane endpoint if any of the two following criteria is observed:
[0374] Criterion 1: Fish is in lateral-recumbency, dorsolateral-recumbency, or dorsal-recumbency on the bottom of the tank or floating at the water surface.
[0375] Criterion 2: Fish is unable to achieve or maintain a normal orientation for a salmonid in the water column.

[0376] Any mortality or terminally moribund fish noticed during the observation period will be removed from the tank; will be recorded on CRF ‘Necropsy’ and assigned an increasing and sequentially numbered case identification number (CID), beginning with ‘1’. Mortalities and moribund fish will be noted as ‘M’.

### Definition of Efficacy

[0377] TP efficacy will be defined as meeting the following criteria:
[0378] Relative improvement of bodyweight and growth parameters including, but not limited to: Weight Gain Ratio (WGR) and Specific Growth Rate (SGR), of the TP in comparison to the NCP. Calculations may consider the following periods: SD 0 to SD 35, SD 35 to SD 84, SD 0 to SD 84.

### Description of Statistical Methods and Calculations

[0379] The tank will be the experimental unit and fish will be the observational unit. Variable calculations and statistical analyses will be performed for individual phases and the overall study. Growth performance variables may include but are not limited to Weight Gain Ratio (WGR) and Specific Growth Rate (SGR). The effect of treatment on growth performance variables will be analyzed, based on data of fish weight, including the mean difference of more than two samples (one control and two treatments) at baseline of the test (time 0) and at the end of the test (Time t) considering time t as a cutoff according to crop densities.

### Example 11

### Genomic and Matabolomic Analysis of Probiotic Lactobacillus Strains

[0380] Analysis of each of Lactilactobacillus strains, Lactobacillus curvatus strains ELA204093 (strain 93), ELA204100 (Strain 100) and ELA214388 (strain 388) and Lactilactobacillus sakei strain ELA214391 (strain 391) was conducted. The genome nucleic acid sequence for Lactilactobacillus curvatus strains ELA204093 (strain 93) is provided in SEQ ID NO: 1. The genome nucleic acid sequence for Lactilactobacillus curvatus strains ELA204100 (strain 100) is provided in SEQ ID NO: 2. The genome nucleic acid sequence for Lactilactobacillus curvatus strains ELA214388 (strain 388) is provided in SEQ ID NO: 3. The genome nucleic acid sequence for Lactilactobacillus sakei strain ELA214391 (strain 391) is provided in SEQ ID NO: 4.

[0381] Predicted Bacteriocins are provided in Table 29. Also, Strain 391 is predicted to have a TP3KS type metabolite. Genome analysis is provided in Table 30.

TABLE 29

| | | | | Interpro | | |
|---|---|---|---|---|---|---|
| | | Enzy | uniprot | Group | | |
| Qseqid | Sseqid | ID | ID | Name | length | mismatch |
| LAB388_01458 | EN39341087\| | EN39341087 | D4VV13 | N-acetylmuramoyl- | 175 | 61 |
| | D\|D4VV13\|bacteriocin | | | L-alanine amidase | | |
| | | | | domain | | |
| LAB391_01405 | EN74141431\| | EN74141431 | A8E261 | N-acetylmuramoyl- | 193 | 66 |
| | \|A8E261\|Putative | | | L-alanine amidase | | |
| | | | | domain | | |
| LAB391_01405 | EN71201520\| | EN71201520 | GM0020 | N-acetylmuramoyl- | 161 | 41 |
| | \|GM0020\|Lys | | | L-alanine amidase | | |
| | 170-87 | | | domain | | |

TABLE 30

| | Sample Names | | |
|---|---|---|---|
| | LAB388 | LCUR100 | LAB391 |
| Contigs | 100 | 77 | 23 |
| Bases | 1,962,512 | 1,889,821 | 1930890 |
| CDS | 1,967 | 1,873 | 1,952 |
| CRISPR | 4 | 1 | 1 |
| Gene | 2,040 | 1,955 | 2,013 |
| misc_RNA | 36 | 36 | 31 |
| tRNA | 36 | 45 | 29 |
| tmRNA | 1 | 1 | 1 |

### Example 12

### Effect of in-Feed Administration of PTA-16, PTA-17, LCELA388 and LSELA391 on Growth Performance in Atlantic Salmon in Saltwater

### Materials and Methods

[0382] The goal of this study was to confirm the efficacy of L. curvatus strains PTA-127116 and PTA-127117 (TP1) in saltwater with longer duration. Two additional strains, L. curvatus LcELA388 and L. sakei LsELA391 (TP2), isolated from North American salmon intestine were also tested in this study. An 11-week study was performed. 450 female Atlantic salmon parr weighing 125-145 g were recruited from Icelandic hatcheries (CIC), distributed without intentional bias into six 500 L study tanks randomly allocated to three groups with two replicate tanks for each group, and acclimatized to the conditions of the feeding trial and fed with a basal commercial diet with composition appropriate for body weight for fourteen days without handling. The control group (NCP-S) was fed commercial extruded basal diet and the probiotic groups were given TP1-S and TP2-S containing a combined dose of 6.05-6.29×10⁷ CFUs/g. Fish were fed approximately 110% of the specific feed rate (SFR, >1.15) using a Skretting feed table using an automatic feeder. The amount of feed delivered ranged from 1.4 to 3.0/kg/tank/week. Over the study period, fish were maintained in 500 L tanks of flow through fresh water under a photoperiod regime of 24-hour day light. Water flow during the holding period and during experimental period was set at a rate to ensure a minimum of 1.0-1.3 total volume water exchange/hour. Supplemental oxygen was delivered as needed to the tank water to maintain appropriate saturated oxygen levels (70-130% saturation) and water temperature for all tanks was monitored daily.

### Results

[0383] Two test products (TP1-S, TP2-S) and one negative control product (NCP-S) (FIG. 16) were added to commercial fish pellets and fed to three groups of 75 fish each divided between two tanks per group. TP1-S, Test Product 1-Saltwater; TP2-S, Test Product 2-Saltwater; NCP-S, Negative Control Product-Saltwater.

[0384] All fish were weighed and returned on study days (SD) 0, 40, and 75 (FIG. 16A). 20 fish were randomly selected from each tank, weighed, and returned on SD 18, 32, and 54. All fish were euthanized at the end of the study on SD 75 (FIG. 16A). While TP2-S(Test Product 2) did not differ significantly from NCP-S, TP1-S weighed significantly more (P=0.041 for NCP-S vs TP1-S, ANOVA with Dunnett's test (n=64)).

[0385] Average weights for TP1-S, TP2-S, and NCP-S were 318.7 g, 311.8 g, and 304.5 g, respectively (FIG. 16B). The specific growth rates (SGR) for TP1-S, TP2-S, and NCP-S were 2.23, 2.16 and 2.06, respectively. Weights relative to the control group were 4.7% and 2.4% for TP1-S and TP2-S, respectively. The 4.7% increase in final bodyweight for TP1-S translated to a 7.5% increase in average daily weight gain during the study compared to the control. No gross pathology (data not shown) nor mortality revealed concerns about safety.

### Example 13

### Effect of in-Feed Administration of PTA-16, PTA-17, LCELA388 and LSELA391 on Survival of Atlantic Salmon in the Presence of SRS Challenge

### Materials and Methods

[0386] The goal of this study was to evaluate the efficacy of L. curvatus strains PTA-127116, PTA-127117 (TP1) and LcELA388 and L. sakei strain LsELA391 (TP2) for survival in the presence of Piscirickettsia salmonis challenge in a cohabitation model. A 90-day study with the last 61 days taking place during the P. salmonis cohabitation challenge period was performed. 450 female Atlantic salmon parr weighing 139+/−2.6 grams were recruited, distributed without intentional bias into six 500 L study tanks randomly allocated to three groups with two replicate tanks for each group, and acclimatized to the conditions of the feeding trial and fed with a basal commercial diet with composition appropriate for body weight for fourteen days without handling. The control group (NCP-S) was fed commercial extruded basal diet and the probiotic groups were given TP1-S and TP2-S containing a combined dose of 6.05-6.29×10⁷ CFUs/g. Fish were fed approximately 145% of the specific feed rate (SFR, >1.15) using a Skretting feed table using an automatic feeder. The amount of feed delivered ranged from 1.4 to 3.0/kg/tank/week. Over the study period, fish were maintained in 500 L tanks of flow through fresh water under a photoperiod regime of 24-hour day light. Water flow during the holding period and during experimental period was set at a rate to ensure a minimum of 1.0-1.3 total volume water exchange/hour. Supplemental oxygen was delivered as needed to the tank water to maintain appropriate saturated oxygen levels (70-130% saturation) and water temperature for all tanks was monitored daily. One week before challenge started, water temperature was raised in order to acclimate the fish to the challenge water parameters.

[0387] The P. salmonis challenge was performed on a cohabitation mode by inserting P. salmonis inoculated fish to act as shedders. On challenge day, shedder fish of the same origin as the test fish were inserted into the six study tanks after injecting them intraperitoneally (i.p.) with a 0.1 ml dose of the challenge inoculum. The inoculum concentration was 3.9×10⁶ colony forming units (CFU)/ml of P. salmonis belonging to the EM90 (A) genogroup. Fifteen shedders were inserted into each study tank, corresponding to a 21.4% of the test fish number (N=70). Challenge lasted for 61 days.

### Results

[0388] All shedder fish died within the study period. At the end of the challenge period, cumulative mortality within the experimental groups TP1 (L. curvatus strains PTA-127116 and PTA-127117) and TP2 (L. curvatus strain LcELA388 and L. sakei strain LsELA391) was 25.0±9.1% and 18.0±0.8%, respectively. Control group cumulative mortality was 31.4±2.0%. See FIG. 17. Statistically significant differences on survival analyses were found between the control and TP2 groups.

### Example 14

### Effect of Dietary Supplementation of Probiotics During Post-Smolt Stage (Sea Water), on Growth Performance, Immune Response, and Antioxidant Properties of Atlantic Salmon (Study No.: VCC-0136)

[0389] The main objectives of the study are to evaluate growth and performance in post-smolts of Atlantic salmon fed experimental diets with probiotics compared to a negative control and between groups. The secondary objectives of the study are to sample fish for characterizing immune response and blood chemistry and to compare to negative control and between groups. Also studied is preliminary stability of the IVPs following preparation of experimental feeds.

### Study Schedule

TABLE 31
Study schedule

| | | Study |
|---|---|---|
| Task | Activity | week |
| 1 | Fish distribution into study tanks, | −3 |
| | acclimation (CR#1) | |
| 2 | Initial sampling (S1) | −1 |
| 3 | Feed production and stability | −1/0 |
| | sampling FEED | |
| | #1, #2; #3 and #4 | |
| 4 | Feeding experimental feeds | 0-10 |
| | (probiotics), for a 10-week period | |
| 5 | Fish weight monitoring | 2-10 |
| 6 | Intermediate sampling (S2) | 5 |
| 7 | Final sampling (S3) | 10 |
| 8 | Study termination | 10 |
| 9 | Report | 14 |

### Day 0 Definition

[0390] The day of start of feeding is defined as day 0.

### Study Summary

[0391] This study was designed to assess in vivo growth performance in Atlantic salmon fed with test substances (TP: Probiotic 1 and Probiotic 2). The study was comprised by two treatment groups (TP: Probiotic 1-P1 and Probiotic 2-P2) and one control group (NCP) in duplicate study tanks.

[0392] Fish were acclimated for fourteen days (14) before commencement of feeding with the experimental feeds. On day of acclimation/distribution, fish were sedated with Isoeugenol and anaesthetized with Benzocaine, individual weight/length of all fish were recorded, and fish were distributed without bias to their study tanks.

[0393] An Initial weight/length measure was performed at distribution (week-3) with an average weight of 128.3 g (SD±7.4). Initial sampling (S1) was carried out in week-1 with an average weight of 143.5 g (SD±9.9).

[0394] On study day 0 (start of feeding), fish were fed only with the study diets (test or control) for the following 10 weeks of feeding. Four (4) study diets batches were prepared using a non-coated dry commercial feed pellet where the probiotics were suspended in fish oil mix manually and by using a semi automatic dispersion tool, then feed pellets were coated with the oil by a Forberg vacuum coater. At day of preparation samples were collected for probiotic stability evaluation, and later every 14 days after each batch preparation.

[0395] Intermediate sampling (S2) was carried out after 5 weeks of feeding showing an average weight of 240.1 g, with differences among groups, and the final sampling was performed after 10 weeks of feeding with an average weight of 311.6 g showing differences among groups (S3). Fish weights were recorded every two weeks, and feed were sampled for stability every 14 days S1, S2 and S3 include 100% of fish weighted and length measured.

[0396] At all every sampling point blood/serum was collected as well as gut content and stored at −80° C. Additionally pyloric caeca was collected and stored in RNA later at −20° C.; distal intestine was fixed in 4% buffered formalin and stored at ambient temperature. Head kidney smear were collected for immune marker analysis.

[0397] In relation to the growth performance parameters: The fish weight increased from an average range 143-146 g to a range of 303-334 g during the study period. There were no significant differences in Final Weight (FW), Fork Length (FL), Specific Growth Rate (SGR), Thermal Growth Coefficient (TGC) and Weight Gain (WG) of the diet groups from the initial (S1) to the intermediate (S2) sampling. On the other hand, the Condition Factor (CF) were significantly impacted by the diet groups; Control group showed lower CF in comparison to P1.

[0398] Additionally, there were no significant differences from the initial (S1) to final sampling (S3) with respect to FL, SGR, TGC and WG. Differences were observed on FW, where the Control group showed lower in comparison to P1, with no differences with P2. Differences was detected also on CF, Control group showed lower CF when compared to P1 group.

### Study Compounds

### Test Substance

[0399] The test substance(s) were received, labelled and stored. The test substances were kept refrigerated at 5±1.5° C. and protected from light.

$$TP 1 = Lactobacillus curvatus \#93 + Lactobacillus curvatus \#100 ( two lots )$$

$$TP 2 = Lactobacillus curvatus \#388 + Lactobacillus curvatus \#391 ( two lots )$$

### Control Substance/Control Feed

[0400] There was no added control substance. Oil mix and inclusion level was the same among experimental feeds batches (i.e., 18%).

[0401] Test substances were combined with a standard diet to form the test products.

### Experimental Fish and Rearing Conditions

TABLE 32
Test fish

| | |
|---|---|
| Species | Atlantic salmon (Salmo salar), post-smolts |
| Strain | Stofnfiskur |
| Origin | Iceland |
| Gender distribution | All females |
| Batch No. | ST2006 (Acclimation JNo. 2114) |
| Fish size | 128,3 g (SD ± 7.4) |
| Treatment status | Non-vaccinated |
| Physiological status | Post-smolt |
| Number of fish | 420 test fish + 30 extra fish (samples) |

### Inclusion/Exclusion (Non-Inclusion) Criteria

### Inclusion Criteria:

[0402] All study fish participating in the study were unvaccinated. At first, the infectious status of the study fish and/or egg origin was documented to be negative for the following pathogens: Piscirickettsia salmonis, Renibacterium salmoninarum, Flavobacterium psychrophilum, Piscine orthoreovirus (PRV), Infectious Salmonid Anemia Virus (ISAv) and Infectious Pancreatic Necrosis virus (IPNv). Fish batches are screened by q-PCR for the above-mentioned pathogens before smolt release from hatchery to challenge rooms. Samples were obtained between 14 days before the acclimation period started. A new sampling was performed at the hatchery, confirming the PRV positiveness of the sampled tank.

[0403] Fish batch was assessed for gill Na+/K+ ATPase values at an external laboratory during the fourth week of 24:0 h photomanipulation. Fish were deemed smoltified when ATPase values are ≥15 U/mg.

[0404] All study fish in the study were never treated with antibiotics and were deemed clinically healthy, meaning they had no condition causing an impediment to mobility or feeding, i.e., fish had good quality fins and good body condition provided they were selected during the study tanks conformation.

### Exclusion (Non-Inclusion) Criteria

[0405] Sexually matured, injured or deformed fish and fish that appeared not to be fully smoltified were excluded from the study upon arrival or during distribution or at treatment in study tanks. As a provision any fish batch that could have gone through an outbreak or had been detected with pathogens was excluded. PRV was an exemption, which was tested to know the sanitary status and prevalence.

### Husbandry Management

[0406] Fish and tanks were tended and monitored on a daily basis. Fish were fed via automatic feeders (115 EGI, EWOS Growth Index) using feed provided by CIC. Salinity was ca. 27% % during the whole study. The photoperiod light:dark was 24:0 h the whole study. Environmental parameters were recorded automatically (water exchange, temperature and oxygen saturation inside each tank; salinity and pH in header tank).

TABLE 33
Husbandry conditions

| | |
|---|---|
| Tank size | 0.5 m³ (500 l) |
| Salinity | Average of 27.3‰ (SD ± 0.81) during acclimation. |
| | Average of 27.5‰ (SD ± 0.51) during the experimental feeding |
| Density | About 20.5 kg/ m³ at stocking: |
| | About 40.5 kg/ m³ at termination (differences depending on the |
| | experimental group) |
| Temperature (range) | 12.3° C. (SD ± 0.18) during acclimation |
| | 12.3° C. (SD ± 0.14) during experimental feeding period |
| Dissolved oxygen | >70% saturation inside tanks |
| Flow | 1.0-1.3 tanks turnover/h during the study |
| Water discharge | Tube overflow system |
| Cleaning | Once a day (flushing only if required) |
| Photoperiod regime | L:D = 24:0 |
| Feeding | Arvotec automatic feeder). Microration feeding from 16:00 to 04:00 |
| | (approx. 96 pulses in 12 h). |

TABLE 34
Animal Welfare

| Topic | Indication |
|---|---|
| Justification of number of fish to be | 75 fish per tank, 450 total fish, are required to have |
| used: | sufficient data for growth evaluation and sufficient fish |
| | for samplings. |
| | Two replica per group. |
| Endpoint definition | Sampling at termination |
| Temperature adjustments | Standard is no more than 1° C./day |
| Salinity adjustments | approx. 28‰ is required for keep post-smolts of salmon |
| Anaesthesia | Benzocaine for weight records; Isoeugenol |
| | before fish movements or handling as sedative |
| Euthanasia | Overdose of benzocaine |
| Starvation | 8 h before weight samplings (SD 36 and SD71) and 60% |
| | of the ration the day before |

### Study Design

### Design Summary

[0407] This study was designed to assess in vivo growth performance in Atlantic salmon fed with test substances (TP: Probiotic 1 and Probiotic 2). The study comprised two treatment groups (Probiotic 1 and Probiotic 2; P1 and P2) and one control group (NCP) in duplicate study tanks. Fish weight was recorded during the study. Tissue and blood samples were collected during the study.

[0408] Fish were acclimated for fourteen days before commencement of feeding with the experimental feeds (see Table 36). On day of acclimation/distribution, fish were sedated with Isoeugenol and anaesthetized with Benzocaine, individual weight/length of all fish was recorded, and fish were distributed without bias to their study tanks. On study day 0 (start of feeding), fish were fed only with the study diets (test or control) for the following 10 weeks of feeding. Four (4) study diets batches were prepared using a non-coated dry commercial feed pellet where the probiotics were suspended in fish oil mix manually and by using a dispersion tool, then feed pellets were coated with the oil by a Forberg vacuum coater. At day of preparation samples were collected for probiotic stability evaluation, and later every 14 days after each batch preparation.

[0409] Prior samplings, all study fish were sedated with Isoeugenol in the study tank. Then fish were anaesthetized with benzocaine for distribution and weight samplings. Before tissue and blood sampling, fish were euthanized with Benzocaine. Blood, tissue samples and intestine content were sampled before feeding and two times during the study.

### Day 0 Definition

[0410] The day of start of feeding was defined as study Day 0.

### Marking

[0411] There was no marking procedure in the study fish.

### Feeding and Starving of Fish

[0412] Fish were fed (≥1.2 specific feeding rate) during the feeding period. Throughout the duration of the study the fish were overfed to ensure that access to feed is not limited. All the fish were individually weighed and transferred into the study tanks. All study tanks were fed by automatic feeders. Feeding rates were adjusted to ensure overfeeding—not heavy overfeeding that may clog the tanks and make for sub-optimal tank environment. Fish in all tanks were starved as shown in Table 35.

TABLE 35
Times of starving/feed deprivation
of fish before and during the study

| Fish group starved | Event |
|---|---|
| All fish | 24 h before distribution |
| All fish | 8 h before defined weight samplings (SD 36 |
| | and SD 71) and 60% of the ration |

### Test Groups

TABLE 36
Allocation of fish groups during feeding period and samplings.

| | Test/ | Tank | | Sampled | | |
|---|---|---|---|---|---|---|
| Tank | control | volume | Fish | fish (no) | Density | Salinity |
| ID | substance | (L) | (N) | per tank | (kg/m³) ¹ | (‰) |
| B101 | Probiotic 1 | 500 | 75 | S1: 5 | 20.4 | 27-28 |
| | (P1) | | | S2: 5 | | |
| B102 | Probiotic 1 | 500 | 75 | S3: 10 | 20.6 | 27-28 |
| | (P1) | | | | | |
| B103 | Control (Co) | 500 | 75 | | 20.5 | 27-28 |
| B106 | Control (Co) | 500 | 75 | | 20.5 | 27-28 |
| B104 | Probiotic 2 | 500 | 75 | | 20.4 | 27-28 |
| | (P2) | | | | | |
| B105 | Probiotic 2 | 500 | 75 | | 20.7 | 27-28 |
| | (P2) | | | | | |

### Feed Preparation

[0413] Study diets were prepared using a non-coated dry commercial feed pellet with a size of 4 mm (EWOS Micro 100) and/or 6 mm (Micro 250). Test diets (P1, P2, and NCP) were prepared as follows: the test substances, Probiotic 1 or Probiotic 2, were suspended in an oil mix (blend of fish oils, blend of vegetable/poultry/marine oils, and/or soy lecithin) by using Ultraturrax T50 (with a dispersion tool); then feed pellets will be coated with the blended mix oil by a Forberg vacuum coater. Temperature in oil mix, non-coated dry feed pellets and during the dispersion and coating process was kept below 35° C. Test diets (TP1, TP2) were prepared to reach 5% of Probiotic 1 and Probiotic 2. Control diet (NCP) was coated with same oil-mix and at same inclusion level. Study diets were coated with 18% weight-based oil-mix. The study diets were given from the day of commencement of the feeding and throughout the whole-study period. Feed production was documented in a medicated feed preparation record form.

[0414] Feeds were given during the feeding period, except for day of starving/feed deprivation/reduced feeding prior samplings.

[0415] Experimental feeds were produced according to the projection of fish weight and required amounts defined by specific feeding rations, daily delivered feed was documented. Five (5) time points of feed preparations (FEED #1 to #5) were programmed to prepare in total 15 batches of experimental feeds for each of the experimental diets (Table 37). Only 12 batches were used in this present study.

TABLE 37
Feed batches prepared of each experimental diet.

| | | Amount | |
|---|---|---|---|
| | Pellet | prepared | Probiotic Lot. |
| Preparations | size | (Kg) | No. |
| FEED #1 | 4 mm | 10 | — |
| | | 10 | Chinook 2-1 |
| | | 10 | Chinook 2-2 |
| FEED #2 | 4 mm | 10 | — |
| | | 10 | Chinook 2-1 |
| | | 10 | Chinook 2-2 |
| FEED #3 | 4 mm | 5 | — |
| | | 5 | Chinook 2-1 |
| | | 5 | Chinook 2-2 |
| FEED #4 | 6 mm | 10 | — |
| | | 10 | Chinook 3-1 |
| | | 10 | Chinook 3-2 |
| FEED #5* | 6 mm | 2 | |
| | | 2 | Chinook 3-1 |
| | | 2 | Chinook 3-2 |

*Not used

### Outcome Parameters—Measures of Effect—Growth Performance Calculations

[0416] Fish growth is the main outcome parameter in the study. Samples and registration of sampled fish is also an outcome parameter in the study. Fish growth performance was analysed using the following equations:

$$Weight gain ( W G \% ) = ( ( FW - IW ) / IW ) \times 100$$

$$Specific growth rate ( S G R ) = ( ( Ln ( FW - ( IW ) ) / D ) \times 100$$

$$Thermal growth coefficient ( T G C ) = ( ( {( FW )}^{( 1 / 3 )} - {( IW )}^{( 1 / 3 )} ) / T \times D ) ) \times 200$$

$$Condition factor ( C F ) = ( FW / {FL}^{3} ) \times 100$$

[0417] Where, FW=mean final body weight of fish (g), IW=mean initial body weight of fish (g), T is water temperature in ° C., D is feeding duration in days. IL and FL are the initial and final fork length (cm) of fish, respectively.

### Statistical Analysis

[0418] Statistical analyses were performed. Data was analysed for descriptive statistics and significant differences among groups by GraphPad Prism 7 (version 9.31, GraphPad Software, Inc.). Tanks and/or treatment/groups were used for the analysis of growth performance. Normality of the data was checked with various tests within GraphPad Prism 7. One- or Two-way ANOVA (parametric or non-parametric) with Multiple comparisons tests were run depending on the characteristics of the data.

[0419] No Adverse Events were registered in this study.

### Sampling and Diagnostics

### Weight

[0420] Calculation of mean fish weight at distribution, on sampled fish and at termination was carried out. All study fish were weighed and measured at distribution, S1 (initial sampling), at S2 (intermediate sampling) and at termination S3. Additionally, weight sampling of 20 fish per tank was programmed every two weeks.

TABLE 38
Summary of activities and samplings of the Study.

| Study Day +/− 3 | Study Activity |
|---|---|
| −21 +/− 2 − 18 | Health assessment / Sample for screening |
| | 450 fish were enrolled and distributed in 6 500 L tanks (total 75 fish per |
| | tank). All fish were individually weighed (100% population) and length |
| | measured. |
| −18 to 0 | Acclimation; Randomization. |
| −1 | Si: sampling 1 |
| | Weight sampling: all fish were individually weighed (100% |
| | population). |
| | Sample collection: 10 fish per treatment (5 per tank) were |
| | euthanized and sampled (blood and gut samples) |
| 0-71 | Record daily observations. |
| | Sample weight each two weeks for feeding rate calculation (20 fish |
| | per tank). |
| | Study Diets were delivered from SD 0 until end of trial. |
| | Feed samples for stability check, every 14 days. |
| 36 | S2: sampling 2 |
| | Weight sampling: all fish were individually weighed (100% population) |
| | Sample collection: 10 fish per treatment (5 per tank) were |
| | euthanized and sampled (blood and gut samples). |
| 71 | S3: sampling 3 |
| | Weight sampling: all fish were individually weighed (100% population) |
| | Sample collection: 20 fish per treatment (10 per tank) were |
| | euthanized and sampled (blood and gut samples). |

### Feed Sampling and IVP Stability

[0421] Study feeds were sampled at day of preparation and every 14 days. Feed sampling was performed. A protocol used to assess IVP stability i.e., CFU counts.

[0422] Feed was processed and CFU counts were performed as follows. About 10 g feed was weight and placed in 50 ml tube. 20 mL sterile PBS was added into the 50 ml tub. The mixture was soaked at least 30 minutes and vortexed well. 4500 μl sterile PBS was poured into four 15 ml centrifuge tubes, and labelled label 1-4. 500 μl of supernatant soaked mixture was added to tube 1 (10⁻¹ dilution), and pulsed vortex for 10 seconds. Proceeded with serial dilutions until 10⁻⁴, repeating vortex every time. Each dilution (100 μl) was plated in duplicate in Man, Rogosa and Sharpe (MRS) agar and spread evenly using a Drigalsky loop (plate 100 μl sterile PBS as a blank control). Procedure was repeated with the untreated feed for a negative feed control. Plates were incubated at 22 (+/−1° C.) for 4 (+/−1)-4 days. After final day of incubation each plate was photograph and afterwards colonies counted using ImageJ. CFU was calculated based on colonies per dilution and plotted on log curve. The procedure started with the control diet to secure no cross contamination.

### Results

### Observations

[0423] 1) Environmental parameters including oxygen saturation, temperature, salinity, pH, water exchange and feed amounts were recorded during acclimation and feeding periods.
[0424] 2) All fish that die during acclimation (minimum 5 days before study start) and after study start—or are removed at humane endpoints—were necropsied.
[0425] 3) Weight and fork length were recorded in each sampling.

### Efficacy Assessment—Growth Performance

[0426] Weight Gain, Specific Growth Rate (SGR), Thermal Growth Coefficient (TGC) and Condition Factor (CF) of the TP (P1 and P2) in comparison to the NCP (Control), were calculated between the period of initial sampling and intermediate sampling (S1 to S2); and initial sampling and final sampling (S1 to S3). There were no mortalities during the study. The growth performance parameters are presented in Table 39.

TABLE 39
Growth performance indicators of Atlantic salmon offered experimental feeds: Control
(NCP), Probiotic 1 (P1) and Probiotic 2 (P2), evaluated at different time periods.
Initial to Intermediate sampling

| Parameters | [symbol] | [symbol] | [symbol] | FL (cm) | CF (g/cm3) | SGR | TGC | WG (%) |
|---|---|---|---|---|---|---|---|---|
| [symbol] of | | | | | | | | |
| main effects | | | | | | | | |
| Control [symbol] | 145.07 ± | 23.39 ± | 236.70 ± | 26.75 ± | 1.23 ± | 1.36 ± | 2.10 ± | 63.20 ± |
| | 0.83 | 0.05 | 1.9 | 0.07 | 0.00 [symbol] | 0.04 | 0.06 | 2.10 |
| Probiotic | 142.78 ± | 23.36 ± | 242.58 ± | 26.93 ± | 1.24 ± | 1.48 ± | 2.28 ± | 70.00 ± |
| 1 (P1) | 0.89 | 0.05 | 2.51 | 0.09 | 0.00 [symbol] | 0.07 | 0.12 | 4.10 |
| Probiotic | 142.65 ± | 23.37 ± | 240.93 ± | 26.73 ± | 1.26 ± | 1.45 ± | 2.27 ± | 68.45 ± |
| 2 (P2) | 0.80 | 0.04 | 2.35 | 0.08 | 0.00 [symbol] | 0.00 | 0.01 | 0.15 |
| P values | 0.103 | 0.916 | 0.103 | 0.1543 | 0.013 | 0.200 | 0.330 | 0.170 |

Initial to Final sampling

| | [symbol] | R (cm) | [symbol] | FL (cm) | CF (g/cm3) | | | |
|---|---|---|---|---|---|---|---|---|
| Parameters | SEM | SEM | SEM | [symbol] | [symbol] | SGR | TGC | WG (%) |
| [symbol] of | | | | | | | | |
| main effects | | | | | | | | |
| Control [symbol] | 145.07 ± | 23.39 ± | 304.47 ± | 29.37 ± | 1.19 ± | 2.06 ± | 1.69 ± | 109.90 ± |
| | 0.83 | 0.05 | 4.23 [symbol] | 0.11 | 0.00 [symbol] | 0.03 | 0.02 | 2.00 |
| Probiotic | 142.78 ± | 23.36 ± | 318.69 ± | 29.64 ± | 1.21 ± | 2.23 ± | 1.84 ± | 123.30 ± |
| 1 (P1) | 0.83 | 0.05 | 4.73 [symbol] | 0.13 | 0.00 [symbol] | 0.14 | 0.13 | 10.90 |
| Probiotic | 142.65 ± | 23.37 ± | 311.75 ± | 29.62 ± | 1.19 ± | 2.17 ± | 1.78 ± | 117.95 ± |
| 2 (P2) | 0.80 | 0.04 | 4.31 [symbol] | 0.11 | 0.00 [symbol] | 0.04 | 0.03 | 3.05 |
| P values | 0.103 | 0.916 | 0.033 | 0.197 | 0.024 | 0.467 | 0.467 | 0.333 |

[symbol]

[symbol]

indicates data missing or illegible when filed

[0427] The fish weight increased from an average range 143-146 g to a range of 303-334 g during the study period. There were no significant differences in FW, FL, SGR, TGC and WG of the diet groups from the initial (S1) to the intermediate (S2) sampling. On the other hand, CF were significantly impacted by the diet groups; Control group showed lower CF in comparison to P2.

[0428] Additionally, there were no significant differences from the initial (S1) to final sampling (S3) with respect to FL, SGR, TGC and WG. Differences were observed on FW, where the Control group showed lower in comparison to P1 (304 g vs. 318 g), with no differences with P2 (311 g). Differences were detected also on CF, Control group showed lower CF when compared to P1 group.

### Stability Assessment of Probiotics in Feed

[0429] Five (5) time points of feed preparations (FEED #1 to #5) (Table 37) were prepared accounting for a total of 15 batches of experimental feeds. Only 12 batches were used in the present study; all were tested for stability. At the day of preparation, two samples of about 100 g were collected per experimental diet, and stored at 4° C. These samples were used to monitor the stability of probiotics the next day of preparation of the medicated feeds. Thereafter, the samples were collected directly from the bag stored at the feed storage room (15-20° C.). Exception was the second monitoring (14 days after preparation of feed) which was collected from storage at 4° C. Stability of probiotics in feed was monitored 1 day after preparation (storage at 4° C.), 14 days and 28 days after preparation (storage at 15-20° C.).

[0430] Stability of probiotics in feed are graphically shown in the following Table 40.

| FEED | Batch | | Calculated concentration (CFU / ml) | | |
|---|---|---|---|---|---|
| # | JNo. | Product | Day 1 | Day 14 | Day 28 |
| 1 | 2107 | Control | 6.50, E+02 | 1.65, E+03 | 5.00, E+04 |
| | 2108 | Chinook | 3.60, E+07 | 3.55, E+07 | 3.42, E+07 |
| | | 2-1 | | | |
| | 2109 | Chinook | 2.84, E+07 | 2.53, E+07 | 9.00, E+06 |
| | | 2-2 | | | |
| 2 | 2110 | Control | 1.50, E+03 | 2.80, E+03 | 2.50, E+03 |
| | 2111 | Chinook | 4.25, E+07 | 3.67, E+07 | 3.10, E+07 |
| | | 2-1 | | | |
| | 2112 | Chinook | 2.33, E+07 | 1.11, E+07 | 5.25, E+06 |
| | | 2-2 | | | |
| 3 | 2113 | Control | 1.70, E+03 | 1.30, E+04 | 9.50, E+03 |
| | 2114 | Chinook | 2.40, E+07 | 3.73, E+07 | 2.03, E+07 |
| | | 2-1 | | | |
| | 2115 | Chinook | 1.10, E+07 | 1.00, E+07 | 5.55, E+06 |
| | | 2-2 | | | |
| 4 | 2116 | Control | 0.00, E+00 | 5.00, E+02 | * |
| | 2117 | Chinook | 2.08, E+07 | 1.80, E+06 | * |
| | | 31 | | | |
| | 2118 | Chinook | 5.74, E+07 | 1.85, E+06 | * |
| | | 3-2 | | | |
| 5** | 2119 | Control | 0.00, E+00 | | |
| | 2120 | Chinook | 2.47, E+07 | | |
| | | 3-1 | | | |
| | 2121 | Chinook | 5.94, E+07 | | |
| | | 3-2 | | | |

### Example 15

### Effect of Dietary Supplementation of Probiotics During Post-Smolt Stage (Seawater) on Growth Performance, Immune Response, Antioxidant Properties and Survival of Atlantic Salmon (Salmo salar) in the Presence of a Piscirickettsia salmonis Challenge (Study No.: VCC-0137)

[0431] One of the main objectives of the study are to evaluate growth and performance in post-smolts of Atlantic salmon fed experimental diets with probiotics compared to a negative control and between groups. Another main objective is to evaluate the survival rate of the experimental groups in response to a controlled P. salmonis infection challenge under a cohabitation model. Another main objective is to evaluate the infectious status of fish within the experimental groups in response to a controlled P. salmonis infection challenge under a cohabitation model.

### Study Schedule

TABLE 41
Study schedule. The first day of control/experimental
feeding was defined as Study Day 0.

| | | Study |
|---|---|---|
| Task | Activity | day |
| 1 | Health assessment / Samples for screening | −22 |
| 2 | Fish distribution into study tanks | −21 |
| 3 | Formal acclimation begins | −14 |
| 4 | Production of feed batch N1 | −4 |
| 5 | Sampling S1 | −1 |
| 6 | Experimental feeding begins | 0 |
| 7 | Weight sampling (study day 14) | 14 |
| 8 | Production of feed batch N2 | 22 |
| 9 | Water temperature to 15° C. | 23 |
| 10 | Sampling S2 | 28 |
| 11 | Cohabitation challenge; shedders inoculation | 29 |
| 12 | Production of feed batch N3 | 43 |
| 13 | Production of feed batch N4 | 62 |
| 14 | Production of feed batch N5 | 77 |
| 15 | Sampling S3 & Study termination | 90-91 |
| 16 | Final Report | 148 |

### Study Summary

[0432] The study aimed at evaluating the short-term performance effects as well as the survival response against a controlled cohabitation P. salmonis infection model of adding mixtures of probiotics (test products) in the feed of Atlantic salmon post smolts. Test product diets (TP) and a control diet were tested under a duplicated tanks design. Study fish were stocked into six 500 L tanks (N=82 fish per tank) and acclimated for 14 days at a water temperature of 12.4±0.2° C. and a salinity of 28.7±2.8%. After the acclimation period, the experimental/control feed delivery started on all tanks in a duplicated tanks design. Average fish weight at this point was 139.5±2.6 grams. Control feed, TP1 (Chinook 3-1), TP2 (Chinook 3-2), TP1 (Chinook 4-1), TP2 (Chinook 4-2) were delivered into tanks. The experimental and control feed were produced on-site and the viability of the added probiotics in these was assessed three times (days 1, 14 and 28 post-production) for each feed batch produced (N=5). The experimental feeding period lasted for 90 days, with the last 61 days taking place during the P. salmonis cohabitation challenge period. During all this period, feed was delivered in excess to all six study tanks with SFR being above 1.45% throughout the whole study. One week before challenge started, water temperature was raised in order to acclimate the fish to challenge water parameters. During this week and during challenge, average temperature was 15.1±0.2° C. and salinity was 27.6±2.2% %. No significant differences were found between study groups when comparing weight gain and other performance parameters for any of the studied periods,

[0433] The P. salmonis challenge was performed on a cohabitation mode by inserting P. salmonis inoculated fish to act as shedders. On challenge day, shedder fish of the same origin as the test fish were inserted into the six study tanks after injecting them intraperitoneally (i.p.) with a 0.1 ml dose of the challenge inoculum. The inoculum concentration was 3.9×10⁶ colony forming units (CFU)/ml of P. salmonis belonging to the EM90 (A) genogroup. Fifteen shedders were inserted into each study tank, corresponding to a 21.4% of the test fish number (N=70). Challenge lasted for 61 days. All shedder fish died within the study period. At the end of the challenge period, cumulative mortality within the experimental groups TP1 and TP2 was 25.0±9.1% and 18.0±0.8%, respectively. Control group cumulative mortality was 31.4±2.0%. Statistically significant differences on survival analyses were found between the control and TP2 groups.

[0434] All mortalities during the challenge as well as all survivors at the end were examined by necropsy for Piscirickettsiosis clinical signs. During the study, three samplings were performed on day-1 (S1; before experimental feeding started), day 28 (S2; before disease challenge started) and day 90 (S3; end of challenge period and study termination).

### Study Compounds

### Test Substances/Products/Investigational Veterinary Product (IVP)

[0435] The test substances were kept refrigerated at about 5.0° C. and protected from light. Test products are as follows:

$$TP 1 = Lactobacillus curvatus \#93 + Lactobacillus curvatus \#100 ( two lots )$$

$$TP 2 = Lactobacillus curvatus \#388 + Lactobacillus curvatus \#391 ( two lots )$$

[0436] The test substances were combined with a standard diet to form the test products.

### Control Substance/Product

[0437] There was no added control substance.

### Experimental Fish and Rearing Conditions

TABLE 42
Test fish

| | |
|---|---|
| Species | Atlantic salmon (Salmo salar), post-smolts |
| Strain | Stofnfiskur |
| Origin | Iceland |
| Gender distribution | All females |
| Fish size | 114.4 ± 8.5 at stocking |
| Treatment status | Non-vaccinated |
| Physiological status | Post-smolt |
| Number of fish | Total of 602 fish |
| | 492 test fish |
| | 90 shedder fish |
| | 20 fish initial screening |

### Inclusion/Exclusion (Non-Inclusion) Criteria

### Inclusion Criteria:

[0438] All study fish participating in the study were unvaccinated. The infectious status of the study fish and/or egg origin is documented to be negative for the following pathogens: P. salmonis, Renibacterium salmoninarum, Flavobacterium psychrophilum, Piscine orthoreovirus (PRV), Infectious Salmonid Anemia Virus (ISAv) and Infectious Pancreatic Necrosis virus (IPNv). Study fish batch was screened by q-PCR for the above-mentioned pathogens before smolt release from hatchery/smoltification room to challenge room. All analyses resulted negative for the following pathogens: R. salmoninarum (PCR and IFAT); P. salmonis (PCR), F. psychrophilum (PCR), PRV and IPNV.

[0439] Fish batch was assessed for gill Na+/K+ ATPase values at an external laboratory during the fourth week of 24:0 h photomanipulation; that is 28 days before stocking fish into the study tanks. Fish were deemed smoltified with ATPase values ≥14.5 U/mg.

[0440] All study fish were never treated with antibiotics and were deemed clinically healthy, meaning they had no condition causing an impediment to mobility or feeding, i.e., fish had good quality fins and good body condition provided they were selected during the study tanks formation.

### Exclusion (Non-Inclusion) Criteria

[0441] Injured or deformed fish and fish that appeared not to be fully smoltified were excluded from the study upon arrival or during distribution or during samplings.

### Husbandry Management

[0442] Fish were fed via automatic feeders (115 EGI, EWOS Growth Index) using feed provided by CIC. Salinity was about 28% % during the whole study. The photoperiod light: dark was 24:0 h the whole study. Environmental parameters were recorded automatically (water exchange, temperature and oxygen saturation inside each tank; salinity and pH in header tank).

TABLE 43
Husbandry conditions

| Tanks volume | 0.5 m³ (500 l) |
|---|---|
| Salinity | 28.0 ± 2.6‰ |
| Density | Av. 18.8 kg/ m³ at stocking |
| | Av. 21.5 kg/ m³ at S1 (one day before experimental |
| | feeding started) Av. 29.6 kg/ m³ at S2 (one day |
| | before cohabitation challenge) |
| Temperature | 12.5 ± 0.3° C. during acclimation and for the first 21 days of |
| | experimental feeding |
| | 15.1 ± 0.2° C. seven days before challenge and during challenge |
| Dissolved oxygen | >77% saturation inside tanks (minimum value 77%-maximum value |
| | 118%) |
| Flow | 8.3 ± 0.2 L/min (i.e., 1.0 tanks turnover/h) |
| Water discharge | Tube overflow system |
| Cleaning | Once a day (flushing only if required) |
| Photoperiod regime | L:D = 24:0 |
| Feeding | 115% (automatic feeder). Microration feeding from 16:00 to 04:00 |
| | (approx. 96 pulses in 12 h). SFR average of 1.54 ± 0.1% during |
| | acclimation and first 28 days of feeding. SFR average of 1.45 ± |
| | 0.1%. |

TABLE 44
Animal Welfare

| Topic | Indication |
|---|---|
| Justification of number | 82 test fish per tank, 492 total test fish, are |
| of fish to be used: | required to have sufficient data for growth |
| | evaluation, samplings and for survival |
| | evaluation on the challenge test. Every group |
| | will have only two replicas. Furthermore, 15 |
| | shedder fish per tank will be used for the |
| | cohabitation challenge (total of 90 shedders) |
| Endpoint definition | Cumulative mortality. Sampling at termination |
| Temperature adjustments | Standard is no more than 1.5° C./day |
| Salinity adjustments | >27‰ is required for keeping post-smolts of |
| | salmon |
| Anaesthesia | Benzocaine for weight recording and before |
| | shedder fish i.p. (intraperitoneal) inoculation |
| Euthanasia | Overdose of benzocaine |
| Starvation | 24 h before fish stocking and before final |
| | euthanasia of challenge survivors |

### Study Design

### Study Aims and Study Groups

[0443] This study was designed to assess the effects of different test products (Probiotic 1-TP1- and Probiotic 2-TP2-) tested in duplicated tanks on growth performance and in response to a P. salmonis challenge when fed to Atlantic salmon post-smolts. The study also includes a control group in duplicate study tanks (Non-Treated Control NCP). See Table 45 for study groups distribution and tanks assignations.

TABLE 45
Allocation of fish groups during feeding period and fish destination.
Fish were stocked in a layered distribution in groups of 20
at a time from tank B101 until B106. Then the process was repeated
until reaching the desired number of 82/tank.

| | | | | | Fish for | |
|---|---|---|---|---|---|---|
| | Test/ | Experimental | Tank | Fish | samplings | |
| Tank | control | group | volume | (N) | (S1-S2- | Fish for |
| ID | substance | ID | (L) | * | S3) N | challenge |
| B103 | None | NCP | 500 | 82 | 5- | 70 |
| | (control | | | | 5- | |
| | group) | | | | 10 | |
| B106 | None | NCP | 500 | 82 | 5- | 70 |
| | (control | | | | 5- | |
| | group) | | | | 10 | |
| B101 | Test | TP1 | 500 | 82 | 5- | 70 |
| | Product 1 | | | | 5- | |
| | | | | | 10 | |
| B102 | Test | TP1 | 500 | 82 | 5- | 70 |
| | Product 1 | | | | 5- | |
| | | | | | 10 | |
| B104 | Test | TP2 | 500 | 82 | 5- | 70 |
| | Product 2 | | | | 5- | |
| | | | | | 10 | |
| B105 | Test | TP2 | 500 | 82 | 5- | 70 |
| | Product 2 | | | | 5- | |
| | | | | | 10 | |

* Two extra fish were included from the beginning on each study tank to compensate in case of eventual mortalities during this period. These extra fish were discarded from the study during S2, right before challenge (see section 9.6 for samplings details).
**S3 took place at the end of the challenge period, so those 10 fish are also included in the “Fish for challenge” column.

### Day 0 Definition

[0444] The first day of experimental/control feed delivery to the study groups was defined as study Day 0.

### Study Duration

[0445] Fish were stocked into the study tanks on study day-21. Formal study acclimation period started on study day-14. Experimental/control feeding started on study day 0) and lasted for a period of 90 days. Of these, the first 29 days took place without any challenge while during the latter 61 days the experimental feeding took place concomitantly with a cohabitation challenge with P. salmonis.

### Experimental/Control Feeds Preparation and Delivery

[0446] Study diets were prepared at the experimental unit using a non-coated dry commercial feed pellet with a size of 4 mm (EWOS Micro 100). Test diets (TP1, TP2, and NCP) were prepared as follows; the test products, Probiotic 1 or Probiotic 2, were suspended in an oil mix (blend of fish oils) by using Ultraturrax T50 (with a dispersion tool), then feed pellets were coated with the blended mix oil by a Forberg vacuum coater. Temperature in oil mix, non-coated dry feed pellets and during the dispersion and coating process was kept below 40° C. Test diets (TP1, TP2) were prepared to reach a 5% inclusion on feed. Control diet (NCP) was coated with same oil-mix and at same oil inclusion level as TP1 and TP2. Study diets were coated with 18% weight-based oil-mix. The study diets were given from the day of commencement of the feeding and throughout the whole study including the challenge period. To cover all this period, experimental and control feed were prepared on five occasions (Table 46).

TABLE 46
Feed batches prepared of each experimental/control diet.

| | | Amount | | Test product |
|---|---|---|---|---|
| | Pellet | prepared | Feed | Lot. |
| Preparations | size | (Kg) | JNo. | No. |
| FEED #1 | 4 mm | 10 | 2122 | — |
| | | 10 | 2123 | Chinook 3-1 |
| | | 10 | 2124 | Chinook 3-2 |
| FEED #2 | 4 mm | 10 | 2125 | — |
| | | 10 | 2126 | Chinook 4-1 |
| | | 10 | 2127 | Chinook 4-2 |
| FEED #3 | 4 mm | 10 | 2135 | — |
| | | 10 | 2136 | Chinook 4-1 |
| | | 10 | 2137 | Chinook 4-2 |
| FEED #4 | 4 mm | 10 | 2140 | — |
| | | 10 | 2141 | Chinook4-1 |
| | | 10 | 2142 | Chinook 4-2 |
| FEED #5 | 4 mm | 10 | 2143 | — |
| | | 10 | 2144 | Chinook 4-1 |
| | | 10 | 2145 | Chinook 4-2 |

[0447] Experimental and control feed were delivered with automatic feeders. Fish were fed in excess (115% of the regular feeding for proper growth) during the experimental feeding period, except for days of feeding reduction/starving before samplings (feeding at 60% of normal ration) or final euthanasia (full starving for 24 hours) of challenge survivors.

[0448] During the acclimation and first 28 days of experimental feeding periods, Specific Feeding Ratio (SFR) was 1.54±0.1%. During challenge period, SFR was 1.45±0.1%. Automatic feeders were used with micro-rations delivered from 16:00 to 04:00 on the next day (approx. 96 pulses in 12 h). During the challenge period and after mortalities started, feeding ratio was adjusted daily for each individual study tank.

### Weight and Length Records

[0449] All study fish were individually recorded for weight and length on stocking day (study day −21), one day before experimental/control feeding started (study day −1) and one day before cohabitation challenge started (study day 28). Furthermore, a sample of fish (N=20/tank) was registered for weight and length on study day 14. Only the first 28 days of experimental/control feeding were used for growth and performance evaluations. Table 8 shows average population weight per tank on all sampling points.

TABLE 47
Study groups and weight recordings at stocking and during the
growth and performance evaluation period (study days −1
through 90). All weight data presented as Average ± SD (grams).

| | | W on | W on | W on | Weight | |
|---|---|---|---|---|---|---|
| | | day −21 | day −1 | day 14 | on day 28 | Weight |
| Tank | Group | (N = | (N = | (N = | (N = | on day 90 |
| ID | ID | 82) | 82) | 20) | 77) | (N = >38) |
| B103 | NCP | 114.4 ± | 139.2 ± | 176.8 ± | 210.6 ± | 261.8 ± |
| | | 7.8 | 11.8 | 16.7 | 24.3 | 30.5 |
| B106 | NCP | 113.8 ± | 136.6 ± | 174.9 ± | 208.6 ± | 361.0 ± |
| | | 8.7 | 14.1 | 19.9 | 28.3 | 30.4 |
| B101 | TP1 | 114.4 ± | 143.2 ± | 181.9 ± | 212.6 ± | 379.0 ± |
| | | 8.5 | 14.6 | 16.6 | 25.6 | 30.9 |
| B102 | TP1 | 115.3 ± | 141.8 ± | 177.8 ± | 216.7 ± | 370.5 ± |
| | | 8.3 | 13.4 | 24.6 | 23.7 | 31.0 |
| B104 | TP2 | 114.1 ± | 138.4 ± | 176.7 ± | 210.6 ± | 372.9 ± |
| | | 9.6 | 13.9 | 19.2 | 25.5 | 30.8 |
| B105 | TP2 | 114.2 ± | 138.8 ± | 175.0 ± | 211.5 ± | 364.3 ± |
| | | 8.1 | 11.5 | 14.5 | 22.0 | 30.5 |

[0450] Before samplings (24 hours) feeding was reduced to a 60% of the corresponding amount. All study fish were sedated with Isoeugenol 50% in the study tanks before weight samplings. Then fish were anaesthetized with Benzocaine 20% for an optimum handling.

### Preparation for Challenge

[0451] After the first 28 days of experimental/control feeding a cohabitation challenge against P. salmonis took place. One week before challenge (study day 21) temperature was raised to about 15° C. in order to acclimate all study fish to the disease challenge temperature. From then on, temperature was maintained throughout the study until termination (15.1±0.2° C.).

### Challenge

### Challenge Isolate

[0452] The challenge isolate P. salmonis have been kept in an ultra-freezer at −75 to −85° C. The frozen material was thawed and grown on cysteine haemoglobin agar plates, harvested and diluted with Leibovitz-15 medium.

### Challenge Procedure

[0453] The challenge was performed by cohabitation with P. salmonis inoculated shedders in sea water. The three study groups were challenged in two replicated tanks each (same tanks as during the first 28 days of experimental/control feeding) according to Table 48. The challenge carriers (shedders; originated from same original batch as test fish and kept on a separate tank under similar water characteristics) were anesthetised, marked using Visible Implant Elastomer (VIE)-tags by injecting a small amount of red VIE tag intradermally (right mandible) and then i.p. injected with P. salmonis using 1 ml disposable syringes with short needless (0.5×8 mm) in accordance with C-1022 and C-1025, before adding them to the challenge tanks. The total amount of shedders was 21.4% of the total amount of test fish in the tanks. Each shedder was i.p. injected with 0.1 ml of the challenge isolate at a concentration of 3.9×10⁶ colony forming units (CFU)/ml. Shedder fish were starved for 24 hours before being inoculated.

TABLE 48
Allocation of fish for the cohabitation challenge.

| | | | | Inoculum | |
|---|---|---|---|---|---|
| Tank | Experimental | Test | Shedder | volume | Challenge |
| ID | Group | fish N | fish N | (ml/fish) | material |
| B103 | NCP | 70 | 14* | 0.1 | P. salmonis |
| B106 | NCP | 70 | 15 | 0.1 | JNo. 2004 |
| B101 | TP1 | 70 | 15 | 0.1 | at 3.9 × 10⁶ |
| B102 | TP1 | 70 | 15 | 0.1 | CFU/ml |
| B104 | TP2 | 69* | 15 | 0.1 | |
| B105 | TP2 | 70 | 15 | 0.1 | |

*One shedder fish died unexpectedly before time on tank B103. Similarly, one test/cohabitant fish died unexpectedly on tank B104 before time.

### Termination

[0454] Mortality was observed throughout a 61 days period after challenge started.

### Outcome Parameters—Measures of Effect

[0455] Fish growth and survival are the two main outcome parameters in the study. Samples and registration of sampled fish and mortalities, as well as feed stability records are also outcome parameters in the study.

### Statistical Analysis

[0456] Data was analysed for descriptive statistics and significant differences among groups by GraphPad Prism 9 (version 9.3.1, GraphPad Software, LLC.). Tanks and/or treatment/groups were used for the analysis of growth performance. Normality of the data was checked with various tests. One-way ANOVA (parametric or non-parametric) with multiple comparisons tests were run depending on the characteristics of the data. Survival analyses between experimental groups was tested under a mantel-Cox test.

### Weight and Length

[0457] All study fish were individually recorded for weight and length on stocking day (study day −21), one day before experimental/control feeding started (study day −1) and one day before cohabitation challenge started (study day 28). Furthermore, a sample of fish (N=20/tank) was registered for weight and length on study day 14. All mortalities during challenge as well as all survivors were also registered for these parameters.

### Anatomopathological Examination and IFAT Preparations

[0458] 100% of challenged fish that died in the P. salmonis challenge as well as all survivors after elimination were examined by necropsy. Furthermore, a head kidney smear was prepared for each mortality and survivor fish into an untreated glass slide for later immunofluorescence antibody test (IFAT) analyses. Smears were fixed with acetone for >3 minutes, let dry at room temperature and then stored at −20° C.

### Bacteriology

[0459] Bacteriological analyses were performed. In total, head kidneys from 63 fish were scored for being positive/negative for P. salmonis growth on APS media with 59 out of 63 plates being positive. Furthermore, agar plates with TSA+sal and FMM media were used for bacteriological analyses on kidneys from 62 and 37 fish, respectively.

TABLE 49
Samplings

| Sampling | Study | N of fish | |
|---|---|---|---|
| number | day | sampled | Tissues sampled |
| S1 | −1 | 30 (5/tank) | Blood serum |
| | | | Head kidney |
| S2 | 28 | 30 (5/tank) | Pyloric caeca |
| | | | Distal intestine |
| S3 | 90-91 | 60 (10/tank) | Gut/gut contents |

[0460] The study included 3 sampling points that involved tissue samples.

[0461] On each sampling (S1, S2 and S3), and one tank at a time, all fish in the tank were sedated with Isoeugenol 50%, and then either 5 (S1 and S2) or 10 (S3) were netted out into a bucket containing Benzocaine 20% as anaesthetic. Fish were then euthanized before proceeding to samples collection. For all fish in all three samplings weight and length were recorded. Sampling tubes/flasks with their contents (RNALater/formalin) as well as acetone and positive-charged-slides were provided.

### Feed Sampling and IVP Stability

[0462] Study feeds were sampled on each preparation day. Two samples of >100 grams were taken from each experimental/control diet, labelled and light-proof stored at about 4° C. until delivery. A protocol was used to assess experimental/control feeds stability (i.e., CFU counts). Feed was processed and CFU counts were performed as follows about 10 g feed was weighed and placed into a 50 ml tube. 20 mL sterile PBS was added into the 50 ml tube. The mixture was soaked at least 30 minutes and vortexed well. 4500 μl sterile PBS was poured into four 15 ml centrifuge tubes, and labelled label 1-4 for making serial dilutions. 500 μl of supernatant of the feed-PBS-soaked mixture was added to tube 1 (10⁻¹ dilution), and mixed using a vortex for 10 seconds. Serial dilutions were made until 10⁻⁴, repeating vortex every time. Each dilution (100 μl) was plated in duplicate in Man, Rogosa and Sharpe (MRS) agar plates and spread evenly using a Drigalsky loop. Procedure was repeated with the untreated feed for a negative feed control (this was performed before the experimental feeds to avoid contamination). Plates were incubated at ˜22° C. for 3 to 4 days. After final day of incubation, colonies were counted from pictures taken to the plates using Image software. CFUs were calculated based on colonies per dilution.

### Results

### Observations and Records

[0463] Feeding, care and registration of mortalities was carried out daily. All mortalities and survivors were stored at −20° C. in bags labelled per day per tank. Stored fish will be eliminated by incineration after this Final Report has been accepted.

[0464] Two fish died during the first days of challenge period due to unexpected causes. One test fish on tank B104 and one shedder fish on tank B103. Both fish were not included for cumulative mortalities values at the end of the challenge.

### Weight and Performance

[0465] Weight gain (WG), Specific Growth Rate (SGR) and Thermal Growth Coefficient (TGC) of the test products TP1 and TP2 compared to the control group (NCP) were calculated for the periods between S1 (study day −1—before experimental/control feeding started—) and S2 (study day 28—one day the disease challenge started—) as well as between S1 and S3 (study day 90-final day of challenge-) (Table 50). Comparisons were also made for fish length and condition factor at each point (Table 51).

TABLE 50
Weight and performance parameters for the periods between start
feeding (Day −1), challenge (Day 29) and end of study (Day 90).

| | Weight (g ± SD) | | | Period D −1 to D 28 | | |
|---|---|---|---|---|---|---|
| | D −1 | D 28 | D 90 | SGR | TGC | WG |
| NCP | 137.9 ± | 209.6 ± | 361.4 ± | 1.50 ± | 2.05 ± | 52.0 ± |
| | 1.83 | 1.40 | 0.57 | 0.02 | 0.03 | 1.00 |
| TP1 | 142.5 ± | 214.6 ± | 374.8 ± | 1.46 ± | 2.02 ± | 50.6 ± |
| | 1.00 | 2.90 | 6.04 | 0.07 | 0.10 | 3.09 |
| TP2 | 138.6 ± | 211.0 ± | 368.6 ± | 1.50 ± | 2.06 ± | 52.3 ± |
| | 0.29 | 0.64 | 6.06 | 0.00 | 0.01 | 0.14 |
| | Period D −1 to D 90 | | | Period D 29 to D 90 | | |
| | SGR | TGC | WG | SGR | TGC | WG |
| NCP | 1.07 ± | 1.51 ± | 162.0 ± | 0.89 ± | 1.29 ± | 72.4 ± |
| | 0.01 | 0.01 | 3.06 | 0.01 | 0.01 | 0.87 |
| TP1 | 1.07 ± | 1.52 ± | 162.9 ± | 0.91 ± | 1.32 ± | 74.6 ± |
| | 0.01 | 0.01 | 2.39 | 0.05 | 0.06 | 5.17 |
| TP2 | 1.09 ± | 1.53 ± | 166.0 ± | 0.91 ± | 1.32 ± | 74.7 ± |
| | 0.01 | 0.04 | 4.94 | 0.03 | 0.05 | 3.41 |

TABLE 51
Length and condition factor at study sampling days −1, 28 and 90.

| | Length (cm ± SD) | | | Condition factor | | |
|---|---|---|---|---|---|---|
| | D −1 | D 28 | D 90 | D −1 | D 28 | D 90 |
| NCP | 22.6 ± | 25.6^{a} ± | 30.5 ± | 1.19 ± | 1.25 ± | 1.26 ± |
| | 0.15^{a} | 0.02^{a} | 0.03 | 0.01^{a} | 0.01^{ab} | 0.00 |
| TP1 | 22.9 ± | 25.8^{b} ± | 30.9 ± | 1.18 ± | 1.24 ± | 1.26 ± |
| | 0.01^{b} | 0.02^{b} | 0.08 | 0.01^{ab} | 0.01^{a} | 0.02 |
| TP2 | 22.8 ± | 25.5^{a} ± | 30.7 ± | 1.17 ± | 1.27 ± | 1.26 ± |
| | 0.00^{ab} | 0.06^{a} | 0.22 | 0.00^{b} | 0.01^{b} | 0.00 |

Values are expressed as means ± SD of two replicates. The letter ^{a} and ^{b} (based on post-hoc results) represent significant differences (p < 0.05) among groups.

### Stability Assessment of Test Products in Feed

[0466] Five time points of feed preparations (FEED #1 to #5) (Table 46) were prepared accounting for a total of 15 batches of experimental feeds. All of these were tested for stability. On feed preparation day, two samples of about 100 g were collected per control/experimental diet, and stored at 4° C. These samples were used to monitor the stability of probiotics the next day of preparation (day 1 post preparation). Thereafter, the samples were collected directly from the bag stored at the feed storage room (about 18° C.) on days post preparation 14 and 28.

[0467] Evaluation records of stability of probiotics in feed were documented in a specific form for this purpose and are shown in Table 52.

TABLE 52
Test products stability assessments.

| | |
|---|---|
| Feed | Calculated concentration (CFU / ml) |

| batch N | Product | Day 1 | Day 14 | Day 28 |
|---|---|---|---|---|
| 1 | NCP | 0.00E+00 | 7.00E+03 | 0.00E+00 |
| | TP1 | 6.86E+07 | 1.94E+07 | 3.70E+06 |
| | TP2 | 7.21E+07 | 4.04E+07 | 2.10E+06 |
| 2 | NCP | 1.50E+02 | 0.00E+00 | 0.00E+00 |
| | TP1 | 9.00E+06 | 6.60E+07 | 3.10E+07 |
| | TP2 | 4.71E+07 | 5.25E+06 | 3.50E+06 |
| 3 | NCP | 0.00E+00 | 0.00E+00 | 0.00E+00 |
| | TP1 | 6.21E+07 | 4.99E+07 | 2.21E+07 |
| | TP2 | 7.90E+06 | 5.80E+06 | 3.25E+06 |
| 4 | NCP | 0.00E+00 | 0.00E+00 | 0.00E+00 |
| | TP1 | 4.75E+07 | 4.10E+07 | 2.43E+07 |
| | TP2 | 5.50E+06 | 2.30E+06 | 2.05E+06 |
| 5 | NCP | 0.00E+00 | 0.00E+00 | 0.00E+00 |
| | TP1 | 4.26E+07 | 3.25E+07 | 2.12E+07 |
| | TP2 | 6.65E+06 | 2.45E+06 | 1.50E+06 |

### Mortalities and Relative Percent Survival (RPS)

[0468] Cumulative mortalities per group on all study tanks as well as pooled results are shown on Table 53. RPS values were calculated. Analysis of survival showed that a statistical significant difference was found between NCP and TP1 (p=0.01). Shedder fish reached a 100% mortality on both challenge tanks between days 10 and 23 post challenge with a 98.9% of these dying between days 10 and 16 post challenge.

TABLE 53
Challenge tanks B101 to B106 containing all three study groups
NCP, TP1 and TP2 in duplicates. Cumulative mortality and RPS
at the end of the challenge (day 61) on test fish challenged by
cohabitation with P. salmonis injected shedders (FIG. 18).

| | | | | Group | |
|---|---|---|---|---|---|
| | | Cumulative | Cumulative | Cumulative | RPS |
| | | mortality | mortality | mortality | End |
| Group | Tank | (N) | (%) | (av.) | point |
| NCP | B103 | 23 | 32.9 | 31.4 | — |
| | B106 | 21 | 30.0 | | |
| TP1 | B101 | 22 | 31.4 | 25.0 | 20.5 |
| | B102 | 13 | 18.6 | | |
| TP2 | B104 | 12 | 17.4 | 18.0 | 42.8 |
| | B105 | 13 | 18.6 | | |

### Bacterial Load by IFAT and Bacteriology

[0469] The IFAT analyses were performed. IFAT results are summarized on Table 54. Bacteriological results for P. salmonis growth on APS media plates are summarized on Table 55. Results for unspecific bacterial growth on other media (TSA+sal and FMM) are not included in table as these were not conclusive.

TABLE 54
Summary of IFAT results. IFAT analyses were performed. Table
shows separate results for fish that died during the challenge
(Mortalities) and fish that survived the challenge (Survivors).
For each tank, the number of fish belonging to the different
IFAT scores are shown. Crosses from one to three depicts
a semi-quantitative system for bacterial load assessment
on the head kidney smears (n = 1 per fish).

| | | Mortalities | | | | Survivors | | | |
|---|---|---|---|---|---|---|---|---|---|
| | | | | | + | | | | + |
| | | | | + | + | | | + | + |
| Group | Tank | Negative | + | + | + | Negative | + | + | + |
| NCP | B103 | 6 | 11 | 5 | 0 | 37 | 1 | 0 | 0 |
| | B106 | 7 | 12 | 1 | 1 | 39 | 0 | 0 | 0 |
| TP1 | B101 | 10 | 11 | 1 | 0 | 36 | 2 | 0 | 0 |
| | B102 | 7 | 5 | 1 | 0 | 42 | 2 | 1 | 2 |
| TP2 | B104 | 2 | 7 | 2 | 1 | 46 | 1 | 0 | 0 |
| | B105 | 4 | 7 | 2 | 0 | 47 | 1 | 0 | 0 |

TABLE 55
Bacteriological analyses; P. salmonis growth on APS media
plates. A total of 63 fish were analysed for bacteriological
analyses by plating head-kidney samples onto TSA media plates.
Incubation was at 22° C. Overall positivity reached a 93.7%.

| | | | | | Positivity |
|---|---|---|---|---|---|
| Group | Tank | Fish N | Positive | Negative | % |
| NCP | B103 | 11 | 10 | 1 | 90.9 |
| | B106 | 12 | 11 | 1 | 91.7 |
| TP1 | B101 | 14 | 14 | 0 | 100 |
| | B102 | 10 | 9 | 1. | 90.0 |
| TP2 | B104 | 7 | 7 | 0 | 100 |
| | B105 | 9 | 8 | 1 | 88.9 |

[0470] This disclosed subject matter may be embodied in other forms or carried out in other ways without departing from the spirit or essential characteristics thereof. The present disclosure is therefore to be considered as in all aspects illustrated and not restrictive, the scope of the disclosure being indicated by the appended Claims, and all changes which come within the meaning and range of equivalency are intended to be embraced therein.

[0471] Various references are cited throughout this Specification, each of which is incorporated herein by reference in its entirety.

The application's sequence listing, which the Patent Office published only in electronic form, follows.

SEQUENCE LISTING (21 sequences)

SEQ ID NO: 1 - DNA, 1913219 bp, Latilactobacillus curvatus
  source 1..1913219: mol_type = genomic DNA
aaaaagcgcggcaacgtcctatcctcgcaggtagtttcccaccaactactatcggcgctaagaagcttaacttctgtgttcgacatgggaacaggtgtatccttcttgctatcgccaccacactattttgtgcttgcgcactgagaagaacttcgttctctcaaaactgcataataagtaatatttcatttcaaaagcctaacattgcacctttggttaagtcctcgaccgattagtactagtccgctccatacatcgctgtacttccactcctagcctatctacctgatcatctttcaggggtcttacttccataaaggaatgggaaatctcatctcgaggggggcttcacacttagatgctttcagcgtttatcccgtccatacatagctacccagcgatgcgcctggcggcacaactggtacaccagaggtatgtccatcccggtcctctcgtactaaggacagctcctctcaaatttcctgcgcccgcgacggatagggaccgaactgtctcacgacgttctgaacccagctcgcgtaccgctttaatgggcgaacagcccaacccttgggaccgactacagccccaggatgcgatgagccgacatcgaggtgccaaacctccccgtcgatgtggactcttgggggagataagcctgttatccccagggtagcttttatccgttgagcgatggcccttccatacggaaccaccggatcactaagtccgactttcgtccctgctcgatttgtcaatctcacagtcaagctctcttatacctttacactctacgaatgatttccaaccattctgagagaacctttgagcgcctccgttacactttaggaggcgaccgccccagtcaaactgcccacctgacactgtctcccgccacgctaagtggcgcgggttagagtggtcatacagttagggtagtatcccaccaacgcctccatcgaaactagcgttccgatttctacggctcctacctatcctgtacaaactgtacaaacactcaatatcaagctacagtaaagctccatggggtctttccgtcctgtcgcgggtaacccgcatcttcacgggtattataatttcaccgagtctctcgttgagacagtgcccaaatcattacgcctttcgtgcgggtcggaacttacccgacaaggaatttcgctaccttaggaccgttatagttacggccgccgtttactggggcttcaattctgggcttcgcttacgctaactcatcctcttaaccttccagcaccgggcaggcgtcagcccctatacgtcatctttcgattttgcagagacctgtgtttttgataaacagttgtttgggcctattcactgcggctgacctgacggtcagcaccccttctcccgaagttacggggtcattttgccgagttccttaacgagagttcactcgctcaccttaggatattctcctcgaccacctgtgtcggtttacggtacgggtagtttatttctcactagaagcttttcttggcagtgtaacatcaggaacttcgctacttaatttcgctccccatcacaacttgtccttaaagaatcaagcatttcactcaactcaagacttgttgcttagacacacatttccagtcgtgtgcattccttagcttcctgcgtccctccatcgttcaaacaaaataaactagtacaggaatctcaacctgttggccatcgactacgcctttcggcctcgccttaggtcccgactaaccctgggaggacgagccttccccaggaaaccttagtcatacggtggatcagattctcactgatctttcgctactcatgccggcattctcacttctaagcgctccactagtccttacgatctagcttcatcgcccttagaacgctctcctaccgcggacacttacgtgtccacccacagtttcggtattatgtttagccccggtacattttcggcgcagcggcactcgactagtgagctattacgcactctttaaatggtggctgcttctgagccaacatcctagttgtctgtgcaccgccacatccttttccacttaacataaattttgggaccttaactggtgatctgggctgtttccctttcgactacggatcttatcactcgcagtctgactcccggaactaaatcaatggtattcggagtttatctgaattcagtaacccatgacgggcccctagtccaaacagtgctctacctccatgatccaatattccgaggctagccctaaagctatttcggagagaaccagctatctccaagttcgattggaatttcaccgctacccacacctcatccccgccattttcaactgacgtgggttcggtcctccagtgtgttttaccacaccttcaacctggacatgggtaggtcacttggtttcgggtctacatctatatactcactcgcccatttcagactcgctttcgctacggctccagcttttcactttaacctcgcatataaacgtaactcgccggttcattctacaaaaggcacgccatcactcattaacgagctttgactaattgtaggcacacggtttcaggatctatttcactccccttccggggtgcttttcacctttccctcacggtactggttcactatcggtcactagggagtatttagccttgggagatggtcctcccggattccgacggaatttcacgtgttccgccgtactcaggatccagaacggaggttaagttgtttaatctacgtggttatcacactctttgactcagcttcccagctgattcgattacaacttaacttggtaactccaatgttctgtcctacaaccccaagaagcaagcttcttggtttgggctcttccccgttcgctcgccgctacttagggaatcgatttttctttctcttcctgcaggtacttagatgtttcagttccccgcgtctaccttcattaagctatgtattcacttaatgataatacccgactaaaggtattgggttcccccattcggaaatctccggatcaaagcttacttacagctccccgaagcatatcggtgttagtaccgtccttcatcggctcctagtgccaaggcatccaccgtgcgccctttataacttaacctaactttacctacggtaaagggttattatttgagtttagcgatatgaactaattcatatttctattaaaaaactctttaaaacgcaatgttttctcggcttttaaaactaatatattacttattatccagttttcaaagaacaaagtttgagagtagacctctcaaaactaaacaaagtttcgacttcgcaaatgtacaaggttttccgtattattccttagaaaggaggtgatccagccgcaggttctcctacggctaccttgttacgacttcaccctaatcatctgtcccaccttagacggctggctcccgaaggttacctcaccggctttgggtgttacaaactctcatggtgtgacgggcggtgtgtacaaggcccgggaacgtattcaccgcggcatgctgatccgcgattactagcgattccggcttcatgtaggcgagttgcagcctacaatccgaactgagaatggttttaagagattagctaaacctcgcggtctcgcgactcgttgtaccatccattgtagcacgtgtgtagcccaggtcataaggggcatgatgatttgacgtcgtccccaccttcctccggtttgtcaccggcagtctcactagagtgcccaactaaatgctggcaactagtaataagggttgcgctcgttgcgggacttaacccaacatctcacgacacgagctgacgacaaccatgcaccacctgtcactttgtccccgaagggaaagctctatctctagagtggtcaaaggatgtcaagacctggtaaggttcttcgcgttgcttcgaattaaaccacatgctccaccgcttgtgcgggcccccgtcaattcctttgagtttcaaccttgcggtcgtactccccaggcggagtgcttaatgcgttagctgcggcactgaagggcggaaaccctccaacacctagcactcatcgtttacggcatggactaccagggtatctaatcctgtttgctacccatgctttcgagcctcagcgtcagttacagaccagacagccgccttcgccactggtgttcttccatatatctacgcatttcaccgctacacatggagttccactgtcctcttctgcactcaagtttcccagtttccgatgcacttcttcggttgagccgaaggctttcacatcagacttaagaaaccgcctgcgctcgctttacgcccaataaatccggacaacgcttgccacctacgtattaccgcggctgctggcacgtagttagccgtggctttctggttggataccgtcactacctgatcagttactatcaaatacgttcttctccaacaacagagttttacgatccgaaaaccttcttcactcacgcggcgttgctccatcagactttcgtccattgtggaagattccctactgctgcctcccgtaggagtctgggccgtgtctcagtcccagtgtggccgattaccctctcaggtcggctatgcatcacggtcttggtgagcctttacctcaccaactaactaatgcaccgcgggtccatcctaaagtgatagccgaaaccatctttcaaccttgcaccatgcggtgctaggttttatgcggtattagcatctgtttccaaatgttatcccccactttagggcaggttacccacgtgttactcacccgtccgccactcactcaaatgttatcaatcagaagcaagcttcttcaatctaacgagagtgcgttcgacttgcatgtattaggcacgccgccagcgttcgtcctgagccaggatcaaactctcgattaaaagtttgtagctcttgttttgttgcttaatttatttgctagcgaaattgactttgcaaatatgttttgtgccccgaagggcgaccctacacatttggtttgtcgaaactttgttcagttttcaaagatctactgtgttgaaacagcttaattaatatatcatttctaacgaacactgtcaagcgtttttaaatgttttttgaataaatattcaaactgatttaattacctgactcgttagcaacaatgttttatctcgctgacaacatagactactatatcagctctacagcctttcgtcaactattaatctcaactgttatttatgaactttcataatctaaacagtcgatagtatccgcaatttatgcaaataaatgaactattaaacgaacaactcgcgcaaacaacataatataccgaaagttgatgcttattcacccacaaaatacactaaaaaaactttttataatcccaatttttttcaataaaaaaagcccgcaagcaaatcgtctgcttgcgggctttagtttaatcttaatcgttattattgttgtctggacgcattgttgggaataataagacatcccgaattgatgcagcatctgtcagtaacatgactagtcgatcaatcccaattccaagtccgccagtcggtggcattccgtattccaatgcttcgatgtaatcttcatcgattccttcggcttcatcgttcccattttcacgttctttagcttgtgcttcaaaacgttcacgttgatcgatagggtcgtttaattcagtaaaggcatttgcatattcgttaccgtacataaataattcccaacggtctgtaaaacgatcatcttcagcattcttcttagccaatggtgagatttcaactggatgaccatagatgaaggttggttgtaccaatgtatcttccacgaattcttcaaagaacgcattaatgatgtgccccacttgccagtatgattcatacttcacgtggtgttgatcagctaattcacgcgctgcttcaaccgtcattggttgccagaaatcgacacccgtcttttccttaattgcatcgaccatgtgaacccgtccaaaatcaccatcaagatcaatcgcttgtccttgatatgaaatctgaccagttcctaaaaccttgtgcgctgcaaatcggatgataccttctgtttcatccataacgtctttataatcaaagtatgcagcatatgtttctagcattgtaaattcaggattgtgtttcgtatcaatcccttcattccggaatacgcggccaatttcatagacacgttccatcccaccaacgattaatcgtttcaaatgaagttcaagcgcaatccgcaagtacaagttgatgtctagcgcattgtgatgggtaataaatggtcgtgctgatgcaccaccagcttgaccatgcaagacaggtgtttcaacttcagtaaagccattgttatctaaatattcacggacagcagaaataatcttgctgcgtttcgtgaaccgatccaagctctctggatttgcgattaaatctaagtaacgttgacgatagatttgttccacgttggttaaaccatggaacttatctggcaatggtcgtaatgcttttgataggaaagtcaggtgcgttgctttaacagttaactcacccatgtcagtcttcataatttgcccagtaatccctaaatgatcacctaagtcagcctttttgaaaattaaatagttttcttcgccaacttcatctttacgcacgtaaatttggattttacctgaacggtcacggatgtcagcaaagccaactttccctttcccccgtttagacatcatccgtcctgcaattgtgacttctagattcttagcatctaaatcgtctttttcaattgcttcgaattcactgtgtaattccgcagccatatgtgttctatcaaaacgactaccaaaaggatcaattccttcgtcttttaacaattgtaacttttcacgccggacctttagttggtcgttcatttctctttgattatctttttgtcccaactgacaattcctccatacattcaattatctactaatgttgattttaacacgaaaacaccaacataaggaacctaatttgccattctcgcttcggtttcttctacaaagtggtctaaaatatcgccaacggcttgttccgtttccacttcgttaaccgccgctttggtcttagccgcacgaggaatccctttcaagtaataggcagcttgttgtctgaattcacgacaagccacattttcacctttaagttcgactaaacggtgtaattgtaacttggccgttgcaattttttcccatggggttggttcagcaatcaattcacctgttcgtaagtaggtttccacttggcttaaaatccatggattaccgagcgcagcccggccaatcatgacagcatcagcacccacttcgtctagcatacgtttagcatcttgtggtgtccggacatcaccgttacccataaatggaatcgttaattcagatttaacctgttttaaaatgtcccagtctgcttgcccggtgtacatttgtttccgtgtccgaccgtgcattgcaagtgctgaagcaccagcacgttcggcagcaagtgcattttcaacagcgaaaatatgatcttcatcccagcctgtccgcatcttaaccgttactggcttcttcacggcgtctgtcacgtatgagaccatttcataaaccttgtttggatctaataaccaacgcgcgccagcatctgtcttaacaactttattcactggacaacccatgttgatatcaataatatcagcttgtgtatgttgatccacaaatttagcggcttccactaaggtgtcttttgaaccaccaaaaatttggatgctaactggatgttcattcggatcaacaaacatcatccccattgtcttttgattattgtgcataattccgcgatcactgatcatttcacagaccactaaacctgcgccaaattcctttgcagttacgcgaaatgctgcgtttgtaataccagccattggtgcgacgactacttgatttggaatcgtcacgtctcctatttgccatgtcataatgccaacccattcccttcgtgtcttccgacaatatccaaattatcatagcaaaaaaatagtattcaggcaaaaatttgcgactattctattgcgcggctaaaattgcctttagttctgcttctgtaaattgatattgcttgccacagaaacgacaaaccgcttcagcaccgtggtcttcatcgattaattgttgtaaatccgctggcgcaacagaactgagtgcctttgcaaaccgatcctttgaacaatcacattcgtatttaacaggtattttttctaacgtcttcattgggagttcgcccacaatttcagtgataatttcctctgggctcatcccttgttggagtaattcagacaccagcggcatttctttcagccgcgcttctaagatatcgattaaccggtcatccgcccctgggagaatttgaatcatgaagcccccagcgacaccaattgagttatcttcattaacgaagactgaaacgccaactgcagatggtgtttgttctgatttagcaaggtagtaagtaaagtcttcacctaattctcctgataccaatggtacttgaccggtaaacggttcttttaagccaagatctttcgtgacactcaacgtaccagttgtcccaacgccacctttaacgtcaattttatttttgtcgttcaatggtaggttaacgtgtggattcgtcacataccctttaactgtgccttgcgcattcccatcgacaacaatcttcccgactgggccgtcaccttcaactctgactgtcatcttcgtatcaccttttaagccagcagcactcaataaaagggtgccgacaatcgtccgcccaaacgctgctgatgaagttgaccatgtgtcatgtttttcttgcgcatccgttacaacatcagttgcgttcactgcataagcacgaagttggccatcttctgaaatttgtttaattaaataatctgtcatctaaataacctcttttatggattgatgcaaaaaggtcgaccactaatcgtgtcgacctttttggtgtaacaatttatgcttcatcgtctggatgttgattatcctcagctggtgtcgattgatcatcttcatcaggtgtgattgtcacatcctttttatcagtttctttttctgaatcttcttttgcggcttcttttgcttcaagcgccttcttagcttcttcaaaagtagctgctttttcgcttgggaattcttcagcgttcttttctggcatcttaccatcattgaacaagctcaagatttctttttcgtttaatgtttcgtacttcaagagcatttccgcaattaacttatgttgttcacggtgcgcttcaataatttcgtgtgcttgttgatgtgcttcgtcaataatccgacgaatttcactatcaattgcagccgcagttgtttcggagaaggctgggccttgaccgtaagctgccccaacgaatggttgaccttctttttcaagggccactgtcccgagcttatcagtcatcccatattgagtaaccatcccgcgggcaatatccgttgcttgttcgaaatcgttagaagcaccagttgattgagagttgaaaataatttcttcagctgtccgaccaccaagtaacccaacaatttgttctgttaattctttcttactcattaagaactgatcattcttcggtaacatgatggcatatccgccagcacggccacgagggacaattgttaccttccgaacaacacgagaatcactaagaactaaaccaatgatcgcatgaccagcttcgtggtaagccacggtttcacgttctttaggattaatcacgcgatcccgcttagcaggacccgcaatcacacgatcttcagcttcatcaacatcagaagcatcgatatcggtcttgctacgacgagcggctactagagcagcttcgttcaataagttttcaagatcagcaccaacgaaccctggggtttgttgcgcaatttctttcaaatcaacatcatcggctaaaggtttgttcttagcatggactttcaagatggcttcacggcccttaacatctggacgaccaactaggatcttccggtcaaaacgacctggacgtaaaagcgctggatctaagacatctgaacggttagtagcagcgatgacgatgacgccttcgttccccgtaaacccatccatttcaactaacatttggttcaatgtttgttcacgttcatcgtgcccaccgcccatgccggcaccacgttggcgaccaacagcatcaatttcatcaataaagataattgatggggctgcttttttggcttgttcgaataaatcacggacacggcttgcaccgacaccgacaaacatttcaacgaagtcagaaccagagattgagaagaatggcacacctgcttctccggcaacggctttagctaataaggttttaccagtacctggaggtccttctaaaagaacacccgctggaattctagcccctaatgcagcaaacttccgtggatcttttaagaattcaacaacttcgactaattcttgtttttcttcttccgcaccagcgacatcagagaaacgtactttattagctttcttgtcggctttttgagctttggacttaccaaagttcatcatccgaccgccttgaccgccaccttgacccgcttggcccatcatcatgtagaataaaccaaacatgatgatcaatggcaatacaagacttaaaatacttacccaccaaccagattgtggttcttgaagggtttcaaccttggttgctgatttgtcagctaacttggtcattgccccaacttgtgaatcactttgtaataaggttgttgtgaagtgtttaactgatcttgcttttgttttttgtcctaaaagattctttttaggctgttctgttttttgtgctttacgatattctccagaaattttataaataccattcgttggttgaattgagaatgacttgaccttattggtcttcaattcacttaaaaatgtacttgattgaacttccttagactctgatccagcgttaccgttcatgaagaacgagaacacaccgactaaagccactaagataataatgtaaaacagactattactaaacagtccattctttttgttgttcatacgtgacctcctgaagcttctcatcatttgtgacacagtgtccttttgacactgttaaactataacatatctgacttttattgaccatttatttacccgaataaatttcaggtttcaaaacgccaattgttcccatatttctgtatcgttcggcatagtccaatccgtaccccacaacgaattcatttgggacttccatcccaacataatccgaatgaactggcacaattcgacggcttggtttgtccattaacgtgcagactttaattgagtttgcttgacgtgttttaagaattgccattaagtaattcaacgtgcgcccagtatctacaatatcttcgataatgataatgtcgcggcctttaacactcgtatctaaatctttgatgattttaacttcacctgacgagatggtctcagcaccataacttgacacatccataaagtcgatttcaacatggaggtcaatttcgcgaatcaaatctgtcatgaagacgatcgcaccctttaaaataccaattaataacgggtttttaccttgataatccgctgtaatttgttttcctaagcgctgattaaccttttgaatgtcttctcttgaatataatacgcgttcaatatctttttctaacattgtgccagcctccgtaatttgcttaatcatctaaataacatagtatgtaccgtattttaccagtttgttcgcgattaaacaacgccgaaatccgtaaatccggccggccaagcaattgatttggggtccaaaccgcccatgcattttggcgctttgcctgtggggttttagtatcaatccataaccgttgaatggttttgtggtgtgccttatcaagcattattcgatctgttgcttgtagcgccctgagttgcagtggccattcctctggtgctaaccaaacgacctgttgccgttgaacttgattaggtagatggtcgatatcgaaaacaccaacttgttcgccattttttaaccgcagccattcattaatcgctaatgttcgtgttttgaccaaagaatccactatttggtggacaccaatccgaaaacaccgatactgcttttcaaaaatgatgccattgttcaatgccacttggccttgcggtttctgcgggttcgccaacaattgttgcacttgcattaactgggctgcctttaacgccggtaaagtcttgaaatatcgttgccacaccaattgccagagcgccctttgttgtgtctggttcaagccatcgagttggtctaaacgcccttcaattgccgtcggctgttttttgattgccaacaatggcagtaacgccgcggttagatcatcttggtgtgccaccatttgggtcagactttgactgaaccgattggcattttgaatcaagtgtggattttctcgttttaaaagtggcaccaccgcatgtcgcatccgattacggagaacagtttgttcctgattggtttgatcttcgtaatacctcaaaccaatctgatcagcgtaatcacgcagttgttgcttactaaaaggtaatagcgggcgaattaacgtccccgttttaaacggtctgacttgccgaatcccccgcatttcatgcaattcaccgctacgaactaatttcatgagcaaggtttctagttgatcgtcgccgtgatgcgcggtcaccaagtaatgcgccgattcggttcgcatgacttgatcaaaaaaagcatagcgaaattgacgtgccgccgcttcaacccctgtttcaggatgactcgcttttggccaatgttgaatgcgtaacgggatggcatgcaatcggcaaaactgggttaaatatttttcttcagccgtactttgcgcacgcaattcatgattaacgtgagccacaacgacttggggtcgttgtttttggggcagatgagtcaataaccacaataaaaccattgaatcgactcccgttgacgttgccaccacaaccttgtcgccggcttgccagaactgctctttttgaagatgtgtttgaaatgcttgttctaacataccgattcctctccaacacagacttgaaatgaaataaaggttgccccgaaagtctatcactaaactttcaagccaacctttatcaatttgttctattaactgcgacggccgccacggccaccacgtttaccttctgtattccgtttaatcgttgataagcgatcttcactatcttttaagaaccctgataataaatcatcaaagccttcttttttaggtgcgcttgaatgctctggtttgcgatatccaccgcgattattatttggacgactttgagggcgcggatgttcttgcactttaggttgatcaacggctttgcggattgataaaccaatcttaccgttttgatctgacataaccttcaccgtgacttcatcaccaacggttaaaacatcatgaatatctttgatataactatcggacacttcactaatatgtaccaacccggttttgccttcacctaaatctacaaaagcaccaaaattcgtaatgcccgttactttaccagcaacttttgaaccaacttcaactgccatataaaactacgtcctcctaaatggtcgtttgaactcgtcaaacttttaatcacttaagcgtgatatttaataaaataagtatagcacgctttgcccttgaaacaaggtcgtattctgaattatttttgttgctaatttaaattaggcgccttgtcctggggcaaactgaagatggtttcaccgtctttagaatagtaatacttgtaccgaatgtatttggccaagtaatcattatcatgcagctgttgcacttgaatctttaaatcagattcagttgctttagctttttttaatgtcttttctttagctgccgttgtttctctaatctcggccaatgaatgatgggtttggaaaatctgcacaccacaaattaagacgactaatactgcaacaatccccaagccacataagcggcgtttatgaacacgcttaacatgggctgccttgtcttgcacgattttctgggctgcttgttgctgggtaaatgcattctcgattttcgcaatttttcgactcacttagaagccccccatctcggaattaagttcattatagcaatttcacaaaaaggtcgtcaactaagatcccagattcttaatgacttttattaagatgctcaacaaagtcacaaaaaaaagcaccggcccatattaattcggccagcgctttttccttaatcaaagttttcagcttgtcttgtttccaaaatttcatacatttcagctgcatcgcttttcttcgtagtttcgatgatctgtgtaatgcgtacgaccatcgttttattaccaaatccgatctccagtttatcacccacgatgacattgcttgaagattttgcagggcgatcattaatcatgattcgacccttgtctgcaatttctttcgcaactgaacgtcgtttaatgattcgtgatactttcaaaaatttatctaagcgcattattttgtcctaccttttatttttttcgaaaggcgcaatagttgccggccacctggcatcgtcagccattctcgaatcgagaataattgccaccgtaatgctaatccgccaaataggagcacaccaacgagtacgccaaggcccgtccctaaaatcgcatgtcctctggaactaagtgattgtggtgcaaactgtagcgcaatcttaacacccagccacatcactgcacaaatcgcaagtaacttaccggtaaagcgttgcaaaccaagcgcttgccgtacaatcactggtgattgccgtaaaattaaggctaacacaacaccgaggctgataacagtcccgacactcgcgccaacaatttgatagtgttgcacaagccattgattgattgctactttaacgattaacccaacaattaaggctgccgttgttttatggaactgatcaagactttggagcaccgagttgcaagcattgatcagcgcgatgattgcgatactcaacatataccaaaccaatgcctgattaccatcagcatccccgaataagaaataattaatctgcggcatcaaaaccattaggccggtggttgctgctgccgataaacctaaactgatatgaatcagcgcttcagcaacttgttgaaattgatattgttgccgccgttgccgcgcttgtgacagactcggaatcaacgttgatgagaaggcaagtgacacgactaatcccagctggacaagtggttgcccacggtcaaaaatccccttcatattcttagcaagttcttccgataatccactgaggaccaacccttttttaactgtgaaggaatcaaccagctgtaataacacaattaatgaagcaaagaggcaaattgacccgccttcaatcgctaagcgttttgccaattgttgatacgccttaaaatcgatgccaccacggtgtggcgccttgagttgaaaggcggtttctgctggccgtaataaaatataggttgcaaccaagccgccaaagaaggcgcctgatatcgcccatgtgcccatttcatacactgaccagtgcagtttcaaagatagccacgctgccgccaagatgaccacgacccgcacgagttgctcagcaacttgtgaaaccgccgtcggtaccatattgaaaattccttggaagtacccccgcgtcaccgctagaaacggcatcaataaaaacataaacgataccatttcaatcagcggtgttaatgctggatccgccatcgcccccgcaattttcggcgcttgatactgtaaataaatgaagattgcagcaccaaagatgcctaacagtgcaaatgagcgtcttaacagctgcgtttgttcctccggattgacttgttcagcaaccagtttcgaaatataaactggaaagccactaagtgcaaacgtcatgccaatgccatagattggatagacttgttgatacacgtaaaagccggtgttaccgaccatattttgaaatggaatccgataaacggcacttaataccttcgcgataaacgacgcaattgataaaatgaccgcgcctttcatcagatgttgcatctgtttattttgcatgcctggcctccacttagcgtgcctaatccgttggttgttccgtgtgcttttgttctatcttcaagagacttgtaacaaaagttgccacttcactcaaccaatctgccggttgcatcttcggctggattacgagtttcacgcttaattgttcttgttcaaacccgaccgttgctttcaagcgggttgtcgataacgcttcaaaaatttgttcacctgaaacaaggcgactgcccttcgccgataaggtgacttgaatgatttctttcgtttgtttgatggtttcgattaacgcgtcatctgcattcatcttcaactgaccaatcgctaataaattagcgacttgatctggataatcaccgaaccggtcaattaaatcggcctgaatttcatcaaaggccgcttctgaatccatctggcgaatccgtttataaatttcaattttttggcgttgatcattaatatacgcgtctggtaagtaagcttctagtttaagatcaatttcggcattcgttttagcaacgacttgcttcccttgtttcttagcgacggcctcacccaacatttgcgagtataggtcaaacccaacagaatcgataaaaccatgttgttgcttacctaataaattaccagctccccgaatcgataaatcacgcatcgcaattttaaacccggaccctaattcggtaaagtccttgatggcctgaagtcgtttctcactaacttccgttaaaaccttatcgggtttatacataaagtaaccgtaagcaatccggctactacgtccaatccggccgcgtaattgatagagctgtgaaagaccgtaatgatcagcatcttcaacaatcatcgtattgacgttaggcatgtcaaccccggtttcaataatcgtggttgtcaccaagacgtcgtatttaccttggacaaagtcgtagatgacaccttctagttgtgcctcggtcatctgaccatgtgcgaacccaaccgttgcttcaggaaccagcgcttgaatctcatcgaccgtgcgttcaatgtcactcactcgattatggaggtaaaacacttgaccattccgttctaattcccgttcaatcgcttcgcgcatcgcaccggcattttgttccatgacatacgtttggataggatagcggttagtcggtggcgtttcaatcacagataaatcacgcacaccgagcatcgacatgtgtaacgtccgtggaatcggcgttgccgtcaacgttaacacgtcaacttgtgccttcaactgcttaagtcgttctttgtgttttacaccaaagcgttgctcttcatcgacaatcaacaagccaagatctttaaacttgatgtcttgcgataacaagcggtgggtgccaatcacgatgtcgactttgccctctgctaagcctttgagcgttgccgtcacttctttgcgcgttttaaaccgtgacagtaaaccaatttcgaccgcaaaatccgcgaagcgtgtcagcatgttttcataatgttgttgcgccagaatcgttgttggcactaaaaaggccacctgtttaccggcttcaacagccttaaaagccgcccgcaaagcgacttccgttttcccaaagccaacgtcgccgactaataatcgatccattggacggacgcgttccatatcatgcttgatttcagcggtactgcgtaattgatcatctgtttcaggataggggaactggccttcaaattcagcctgtaattgatcatcttttggaaaggcaaatcccttttcagcctcccgttgcgcataaagttcgattaaatcatcggcgatatcttcaatctttgccgaaactttactcttagtcttttgccactcgccaccgccaagcttattaatcttcggtgttttggcctcggcagagacgtatttttgcaccatattgagttgagtgactgggataaataacttcccattatcccgatacaagatggtgatgtagtcttgatgaaccccatcgacttccaaggtttccatgccgacgtattcgccaatcccatgattgacgtggaccacgtaatcacctggttttaattcgttataactctttaaccgttctgcattggccaaggtttgccgccggacttttttcttcggcgccgtattgaacagttccttttcagttaagaccaccagttttaaatccggtaattcaaagccattttgaagtgacccttgaatgatttgtgtccgccccgtctccaactgagtcttattggcgatgacggcatcaatttcaaagtcgtggaacgtctgatcaatcttcttgacccgtttaggatcagacacgagcacaatgaccgtttgtttttgcttttgccaatgcgcaatctcggttttcaaaagcggcatttggctaaagaattgttgcaccgtccgcgtgggtaaattgttgagtgcatcgagttttaacttccccattcccttttggaacagtgatagatagagatgcgcatgtgtatcttttttgatgagcgcttgggcatccatcatgagtcgttggtctggcaacatgcggtgggtttccaacatatcggtttgccagttggccgcttcttcagtcaaaatccgctgcgtttctaaaatgcgcggatagtcatcaaaaatcactaagccactctttttaaagtaatcaatcagacttgattgatctggatacagataatcaacaaacaacgctaaattctcaacgcgttcaccggccaacaaccgttcaatcggtgtttcaaagtttgtcgccaattgtttttgttcagttttatccgttattttggccgcaaccgcctcataagctgcttgtaatgcctcaccagccatttccaattgtgctgtgttggccaataagtcagtcgccggcataatttgaacactatctaaattctcaatactccgttgcgtatctgcttcaaaagaacgcagtgaatccacttcagtatcaaagagttcaatccggaccggattttccgcatccagtggaaaaatgtcaataatatccccccgcattgcgaactcaccaggtttaccaaccaacttatctcggaaataacccatttcaccaagttgcgcagcaagtgcctggggatcaacttcactatcggtattgattgtgagttgactatcttgccactgacgcgctgtaggtaataaccgccgcatgcccgcgaccgatgtaatcacaattccttttttgcctgttgctaaaaaactcaacgttcgcacacgttccgctctggactcaggtgaactaactgccatttcagccgccatcacttcttcaactgggaaagtgtaaatctgatcactattgagtaaattactcaaatcatcagcaacttgattggcttggaacgtattactctcaataatcaataagggttgttgtttataaatcgtcgccaaaaacagggttttcgctgatcccgaaagccctgtaagtagttgtttaatccctggtcgttgattctttaaaacggattgcacctgtttggtctgccccagcattgtccttaaatccatgtaaaagttcctttactttcttattataatggcgcgaagaaacgtgctctgttgctaaccgcaaccaaacgcactctgtttttgaaacgtgtcattggcagtagattcctgcgctttgctacacttttcaaatcgccgcttgcagcgtcaattcgccaagttaggcaaatgctcagaatctgaccaactgccaacgacactctaattaaacttattcatcgttttcatgaagtcgtcgttttggcaccagtcttctagtgcttcgcatgcctggtctagtgcttgattgataattggtgcgctgtctttgtcaaacggcgttaagacccagttaacgactgtacttttttgtggatgttgaatcccaactttgacacgcttaaattctgagctttggacacttgcgatgatactcttaatgccgttgtggcctcccgctgaacctttttgccgtaagcgcaacttgcctagcgttaagtccatatcatcttggataactactaattcatctaggttaacttggtagtatttcattaaaggcccgactgaacgaccggaatcattcataaacgttagtggtttcactaagaaaatcgtttccccttcatatttaaagctcccgtattcagcttcaaaatcatgcttgtttaaggtcacattaaaccgttcgcataattgatcaatcaccataaaaccaatgttgtgttttgtctttgcatacttactgcctgggtttcccaagccaacaatcattttcattattaacgtcctctttttgactggcgctatcacgcaaaaattctgagcagttaattctccccagtcgccagttgatattaagaaccattataccatattcagtttatttctctctttgtgaaagaaatagttttctgaaaatttaaccaaaaatcgcgaactttggtgtaaattatgctatactggttttcgaaatgaagaattgatttacagaaaggacgtcattatattggcaaacattgaaaaagatcaccaaaaagttatcctcgtcggcgacggcgctgtaggttctagttacgcttatgcattaactttacaaggtattgcacaagaagttggtatcgtagatatctttaaagaaaaaacacaaggtgatgcaatcgatttatctgatgcattagctttcacttctcctaagaaaatctatgctgctgaatactcagatgcaaaagatgctgacgttgttgttatcacagctggcgcaccacaaaaaccaggtgaaacacgtttagacttagtaagtaaaaaccttaaaatcttgaagacaatcgttgacccaatcgttgaatctggctttaacggtatcttcttagttgctgctaacccagttgatatcttgacatacgctacatggaaattatcaggtttccctaaagaacgcgttatcggttcaggtacatcacttgactcagctcgtttccgtaaagacatcgctgaaatggttaacgttgacgcacgttcggtccatgcttatatcatgggtgaacatggtgatacagaattccctgtatggtcacacgctaacatcggtggtatcaagatttctgaatgggttaaagctcatccagaaattaaagaagaagaacttgttaagatcttcgaaagtgttcgtgacgctgcttacacaatcattaacttaaaaggtgctacattctacggtatcggtactgcattagctcgtattactaaggctatcttagacgacgaaaatgctgtcttaccattatctgtatacatggaaggccaatacggcttgaacgatatctttatcggttcacctgctgttattaaccgctcaggtatcacaagcatccttgaaattccattgacagaccacgaaatggaaagcatgcaccgttctgcaaaacaattaaaagatatcgttacaaaagcatttgctgaattagatatcgaaactcgccaataagctctttgctgttggtcaaacgactctcattaaatgagagtcgtttttttatggtgttaatattatcaactacatattttttatgaaaaataatacttttttatttctttttgggtgcatatcttgtatgctaactattagttaacgcctttgtattttatgtgatactggggtatgattaacctatgcagagattggagttgaggttgtgaaacttacgaagaaagcctacgtcgcccttggcgtagcagccgttatccttgttggaggttactcggcagtcagtcttcattatcaaaaagcattcttgccacatacgaccgttgccggtgtcaacattagtggccaatcagtcgcagacgctaacacagaactcttaaaaaaagtgaatcgtcaaaaatatacgctaaaggataacaatcaaacattgctaacttttagcggtcaagaagctggctttagccataattttaaaccgttattggaaaagattaaaaaaagccaaaacggttggtcttggctagtccacgtttttgccagtgaacaaacaactaaatcagaagacgcactcattttaaatgccgctgattttgacaaattctcaacggaaaccctcgaaaaggtcaacgctgatcgcaaaccttcagagaatgcccatattaacctcgagaatcatcagttcgatctcgtaaaagaagtctacgggaacacaattgatgccgctaagttcaaaaaagcagttgcccacggtattaaccaaggtcaagcaacaatcgacttaaaaaacgattatgcgcaacctgaagtgaaatctacggacaagcaattgaaaaaaactgccgatcaattgaagacgattgctaatgaaaaaatcagctattcagttaatggtaatgatttccaagttcctaaagaagacatccaaagttggttaacgtataacaacggtacaattagtctagataaagctgccgttaccaaatacgtttatcaattaaaggcaaagtatgatacttttgacaaagatttgaccttcaattctacaaaagaaggcacagtcactgtcccagctggaatttatgggtggagtatctctcctgccgatgaaatccacgccttaatgacagaagtgcctaagggcaaagatttctcaagaacagctgttatccgtggttccggaactgatcagaaaacgcgtagtgtcggttcaacctacatcgaaattgatttaaaagcccaacatatgtggctttatcaagatggtaaggtcacaattgacactgatatcgtttcagcacgtccaccacaagtcaccccaaccggtgtttggagcgtttggaagaaagaacgcaatgccacattgaaggggaagaactttgatggggtcagcgaatacgcaagcccagttaattactggatgccaatcgatgaaactggcgttgggattcatgattcgccatggcaacctaagtacggtggtgactggtataaagaacacggctcacacggctgtatcaataccccacctggcacaatggctaaactctacgatactgttagcgaaggcattccagttgtagtgatttagacgtagtgtactagcaacacctctcctctacggattaaccagaggtagctgacctacagaattcgtttagaaaaagtaagctcaacgattaaatacaaagtaggaataaaattaacttttatccctgcttttttattgcttagatttcacgttctttctcatcgattactaatcaagttttcgctgagtcgaaaaactagttattttaatctgcttggtggtatgctatgattacattagtatatgagagaattttaatctaaggagaaagcctatgctcattaaatccctagttttacctaaagaacgtctcaccacaattgttgaatcggtgaccttagaagaagcattacagctactagaagagtctggttaccgttgtgtgcccgtcctagatgctagcggcaagatcttccgcggtaacatctataagatgcacatctaccgtcataagtctcaagggggcgatatgcagcttcccgtgaccagcttattgaagaatatgaccaagtatattccagttgacgcaccgtttttcaaagtattcttcaacattaaagatttgccatacatcgccgtattagacgaagatagcaatttttacggaattctcacgcatagcacgttattaaatatgctttctgaagcgtggaatctcgaattaagtagctatgtactcactgtgctttcttctggtgaacaaggtgatttggttgccatgtcgaagattatcgctaaatatacctcaatcgccagctgcatcaccttagatgctaagcaagatgaattcgtacgacgcacccttttcaccttgcctgctggacttgatcttgagattttgaaaaagattgtttataagctcgagaaaaaaggctatcgtgttcctgaaatcgatgatttacaatctgataaggcgctccgtgatgactccaaacttgatgatttagtttaacgcaaaaaagggcagtcctaattaggactgccctttttaatctttatgatttcatttgtgcatcaaagtgcacaactttatccacagcatacattactggtgcggtaatcaccatgatgactgcttctgaaagtgccaacgaaatatacgttggccagaatggaatgtgtgtgctagcagtagaaccggttaacacaatcatccacgcaatcatacacatcgaaacggtgaacaagagaatattgaccaccattttttgccaagtttgttttaaatagggcatcacaagcgttaatacaagcagcgccaataaagtttgcccgccaccaaaaagcgtatcgagtaacttgttttcagaactgaaaaagaaattgaacactaataccccaccgaaaacaccccatagatatttcttattgaagaccactaaatggtttaagccttccgaaattctaaattgaatggctcctgaagcaaatcccaacatacctgggaataacgataaaacaacgtataatgctgccactaacccgtttagaatcaccgtttttaatcgactttgattcgtcatctttgaatcctcctagtttttttgcgtgggatggttacgaaccacgttttttcgaacagctaccatcatatcatatttaccggctgttgataaaggtcaaaaaaaagagaacccgcttttataagcgggttctcttcattctttctttttggtatttatgtattaaggatttaagaccgctttaagtccaacactaatggtgagcgcccgatcgacttgtgccatcttatccgccactaaatgtgtgacgcgatctttcaagcgttgtttatcaatcgttcgtacctgttctaataaaatcacggagtcgcgttcaacaccattatccttggccgtaatcccaacgtgtgttggtaatttcggtttttgaatctttgctgtaatcgcggcaacgattacggttggactatggtgattacccacatcattttgaatgattaaaacaggacgcatgcccccttgttctgaaccgaccactggtgataaatccgcataaaaaatatcgccacgctgtattaattctcccacttgttctccctccaattaggatcaatcaactacgcgaatgtgtgcgtacgcctcactttcgcaagcgttaaattcagccgcaatttgactgttgatgctagccatctcagcgtacccgttaatgacgttatctacttttgactgtctggtcgccatgaattcgtgaagcgcatcttgaatcaaatcattctcatcaagggcatacacctcacaatactgcttaattgcttggaccaactcaacgtctaatttaacggataattgttcacggttagctttcatctgcatcaacctccgaatcaacactttaacctttattcatcctaccacagaactggcgataatcaaattctcaatccttaatgttcatcaattccactgtaaacccgtggtaaccgatcagataaaccacagataatttcatagtgaatcgtccctgcataatctgcgatctcttgtaaagtaatttcgtcatcaccacttttaccaacaaaaactactttggtccccactggatattgcttaggtaaccgaatcatcaattgatccatgcagacccgaccgacaatttcacaccgatgtccatccaccaaaacggttgagccttgcatccgtctagaccaaccatcggcgtaaccgattggaatcgtcccaatccattcagattcactcgcttcataagtcgcaccgtaaccaatcttacttccggcttcaacttgcttaacaaagaccaattctgattcaagacttagcgccggtttcaatgcataaggcaattcaggaatcgcattccctgaaggattcaatccgtacatactaattcccattcgaattaaattctcattgcaagctgagtgccataaactcgtggctgaattcgaaacatgcacaaatcgtggacattctggtaacacggctactagttcattaaaccgggcactttgttctttaaaataagtatcatcgggatcatccgcagttgcgaaatgggtaaaaatcccttctaaatcaaaatatttcgcatgtgctttgataaatgtggctgctgctagtaattcagtcgcatttctaaaaccaattcgccccataccactatccacactcaaatgaatgtgcattggttgtggataaggtatttgttgggcaatttcgtaagcagcttgcaaccattcgagtgagccgaccgtaatggagatttggttggcaatcaccaattcgatttcggtgggctgtgtaatccctagcaccaaaatgggttccgtaaagttagcacgccgtaaagctaaggcctcatctaaaatagccacacaaaatcctgcagcaccagccgcttgggccgcttctgcaacaggaatcatgccatgcccataagcatttgcttttaagacagggaaaatcactgcatctgtgccttttaaatcctttagttcattttgaatattttcataaattgcgttttgatcaactagaatgcgtgttggtcgtaagtagccgactgtcatcgtctcaacctctttccaaaataacttctgccatcactaacgtcgttgtatgcgaaagtgatacgtggacagttccctcaaataaatcttgtttgatgtagggtttgccctttgcatcatttaacgtttcaatcgcttgcagttgtacctgtccaataccagtcccataagctttactaaaagcttccttcactgcaaagcgccccgctaaaaattctaacgcacggcgccccgtataccgtttaaacagttcatattccttagctgttaatactttttcagcaaaatgactattcttactctgtgctttttcaaatcgatcaatttcggctaaatcaatgcctaatccagcaatcatcgtcttcgcccctagtaccctatttttaattagtttaccacaaaaaagacagagactgaacttacatctctgtcacaattgactatatgaaaacagcggccgaccaagttggccgcccgctgtttttaaaaagtcttatttatcgtttgtacgaattgtgaagttccgttttgaacggccatcagtcttcttacggttgtcacgattgtcattgctacgacgtttgctgctatcgccgttgccactgttgcgacgaccgtctttgttgtcattaccacgacgtttgccatcgccattaccacgacgattgccaccgcgatagccgccaccgttaccgccacgacgattgccgccgccattccggttgccgctacgattgccaccttttttacgtgaaggcaatggacgttctggtgttatcttaacaggaactgattccttgctgattgtcttcaaaagcactgaagctaattcaacgtcagagaattgtttcaataattcttcagcttcttcgctgaatttagccaattggcctttttcaatcattgagttgatgtctgcaaccgctgcagctaattggcccttgaaggcttctttttctgtaggtggttgtaatggtaacatccgtttcttcgttaagttttcgatgatgtgtaagtattccatttcgtttggtgttacaaaagtaactgaaacgcctgacttaccggcacgacctgtccggccaatccggtgaacataactatcaggatcttgaggaatatcgtagttataaacatgggtcacacctgagatatcaagaccacgagcagcaacgtctgttgccactaagatatctaaacggccagccttaaatgatttcaagacgctcatccgtttttgttgtgataaatcaccgtgaatcccttcagcattgtaaccacgagccttcaaaccgcgtgttaattcatcaacacgccgttttgtccgaccaaagattaatgttaattcaggtgattgaacatcgaataaacgcgtcataatgtcgaatttttcgaagtcctttgcccgcacatagtattgatcaattaagtcagccgttaattcttttgactttactttgatcatttcagggttagtcatgaagctcttaccgattttcatgattggtgctggtaatgttgctgagaataaaagtgtttgacgttggtctggcacttgtttgatgatgctttcgatatcatcaacgaagcccatgtctaacatttcgtcagcttcatctaagaccaatgttttcacgtggtctaatttaactgtgcgacggttgatatgatccaataaacgacccggtgtcccaacaagaatttgtgggtgatcttttaatgagcggatttggcgacgaatgtcagccccaccgtatacaacttgtactttcgctttacggtcgcgacctaagcgatagagttcttcttgtgtttggattgccaattcacgcgttggtgaaatgatcaatgcttgaatgttaggattgtctaagtctaagttttgtaagattggtaaaccaaaagcggctgtcttaccggtaccagtttgtgcttgaccgataacatccttaccagctaatgccaatgggattgtttcgccttggatgggtgttgcttcttcaaagccagcgcgttcgatggctttcataattggttctgataaacctaattctgcgaatttcaaatagtgttcctccttgttttgtaaaaaacatgccattacaaaacaggtccacttcgtcaattgcaccattttcaaaaatctgtcttgtaatataattgttttcaaaagcctttttcattaaaaaagctccttaatagcttatcatgccacaacttaattagcaaacggaattgctccaattgttaatctaattccatagcttcaatcgctaaacagcgtgcctgtgcagttgtctgtcaattgctaatcattaattaacttcagtatcttgtaaagcagcgactactttttctaaatgtaagccatgacttgcctttaaaacgattaaatcatcaggttgtacctgcgcttgcaagccagcaattaattgcgtttgttcatggcggttaaagtaatggaggcgttctggtgcataacgctcttttaacgtcacatataatggttcaatttcatccccgaacaagaagacctcttgaatcatcgtgggatctaattcttgggccaaactttcgtgtaatttcttgctggcagtaccaagttccaacatgtcgcctaagacggcaatccgccgcccgtcagtctcaaaatggctgaaattgtgtaaaacttctttggcagccgttgggtttgaattgtaaacatcactcaacatccgttcacccttttgaccaacaagccactctgtccgattacttgtgacttcaaaattcgccaaggcttttttcattaattctggtttaatatggaaccgttgcccaaccaaaattgcggccaacgcattattgacattataagcacccatcattggaatcgtaaacgtcatctctggccaagcattcaacttgaatgacgtttcagtttcacctgcacggacttgtaagggatataagtcattggtcgtcaaattaccgaatgtctcggttgtgagttcgccaacccgttcagtcaatagcggttcgtcgccagcgtaaattaatagaccatcttctttgagcccatctgtgatttccatcttagcatcggcaatcttatcacgcgtcttgaaaaattcgatatgggcttccccgatcatcgtaatgactgcgacatctggcatggctaattcactgagcgcttttaattgacctgggcgatccatccccatctcaatcactaaaatttcagtattagcttccatcgataaaatcgtttgtggcacaccaatttcattattaaagttagcttgtgtcttgtgcatattgtactgactacctaaaacagcagctgtcatatctttcgtcgttgttttaccattactaccggtaatcgcaaccactttgggattaattttttggagataatgcatggctaacttctgataagccgctagtgggtctgtaaccactaatacaggaaaatcagttggctgtgcatcatgattggcagcccaaaaagttgccactgccccattttccttagcttgtccaacaaagtcgtgaccatcacgcataccagctaacggtacaaacaaagcgcccgcatttaattgacgtgcgtcaaacgcaacattcgtcacttcaatggttgcccattgttcaatatcgtttttagccccagtgactcgtgcaatttcacccaactgcattttcatatctcaataactcctattactctgtgtgcatttttacgcacgctttttttagttatggcttaaaatactacgcaatattgtaccatagtttcaaaaaagccccaaaaatgattgaccaccaattaagagtaccaccgtgaatagtcatcaacctgtttatcatttggtcgatattgttgcttagtcggactccgccaccctttaaaagctgttttgcgtagtgcatgatcattttgcagcggtggttggctatctaaccgggcgtgttgccgatcattccgattagcataattaaacgattcaccgtttagtagttgccggagtgtgccatcatctagctggtaatggtcaggattactatcaatcagaccatcagcctttactttaagcacttgccattgactgataaatgctccagatggtgctagaataaattcactatgaaaatccggcgtgagtcgttttcgattccaatgcgttgttgggcgctgtccgttgcggtatttattatggagccgagctggttcacgccgcagccaataatgtggctgggtcgcttgtcgttttcgtacaaaccgcgctaaggcttgttcatctgtttcaccagagtgttgaaaataatggcggatatagcgtagattctgccgatctaaatacattctgaattgatgaatccgtttatcggttaaaactcgaccaacaaatgcacgttgcacactttgcgcaaaggttgctaaaaaaggcgcatctggtgctaattgcgggtcaagttgataatcacgtgctgttaattgcaaaaacgcatgctcatccaactgcgcccctaaatgcgtgagcactaaattgatccgctggtaattaattactggttgtgcagttcggtccccgtatgcttcaaaaagcatttgataaagtgctgagcctacttgatgtaatgcttgccaattgtgttgcaaaatccttttaagcgctgttggttgcgcagcaagttgtcccgttaaatgggttgcataagcgcgtaaactcgcaacgtcccaattagcgcgttctaactgttcaaaatgggccaccacctctgcctgatcaacaatccgataccgctgcggtagtgtttgccgccaaagatccattaattgagtgccatccgttttagttgccaacgttgtgatgatggcgcgttgaatcattgtgcgttgttgcgtcgataatgttagctggtgacgcgcatgcaatgccaataataattgtccacgcacaaccggtaaatcaatcatggtaatctgtttgctcggtgtctcattcaattgcattattagagtagattgtaacgccattaactgctggattggggataatcgcacactgatcactcctcttttcctttattatacaaaaaaagagagggacaaaaatgaattttgcctccctctatataaaacgtgttctatcaactattacctacagctgatgcgttatgtctttaaaacattacatcgctcttaatttagcgactcgttcttcaatcggtggatgactatcaaataaatgagcacccgaccgactaagtcctttaaatggatctgagatatacaaagctgcgcttgatggatccgcagcttgcattggctcactgtcagaaatcttcaataacgcattgatcaaaccttgtgggttccgcgttaattcgacaccagatgcatcagccaagtattcccgatttcgcgacaacgccatctgtgcaatactagccgccaaaggtcccaatatcaacaataggatcgaaaaaaccaaaccgatgatattacttgcaccttcttcacggtcgttatcacgactgcggccgccgccccaccataacatgttgctgccgatgttcacgagcattgaaatcaccgcagaaagtgccaaggcaatcgtttgtaaccgaatatcgtaattgcgaatatgggagacttcgtgagcaattaccccctcaagttcctcccgattcaaacgcgccatgatgccagtcgtaactgccactgcagcatgttgtggatcattgcccgttgcaaacgcgtttgggctaggatcgtcaacaatgaaaacccggggtatcggtacttgggcgaccatcgccatgtcttcaacaatgtgccataaatcaggatattcgctagcatcatggacttcggtcgcatgattcatctgcataacaacgttggttgagtttccaatcatcatcgccatataaacggcggctaaaatagccgccaccacgacaccactaatcaaattacgcataaacagataccctaatgcagccccaattgccaatactaaagcaaaaaagccaatcatcacatataccgttttacgtttgttctgttgaatttgttcaaataacattcccaatcacaccctattcaaaggaaactttaggtgctgctttttcctcaactggcgtttctaagtaagctgtcttttggaaattgtgagcacctgccaaaatattaccagggaaagtttgaatttggttgttgtaacgggtagcacttgagttaaacaattgacgtgcatacgcaattttattttccgtattcgtcaattcttccattaacttcgtaaattctgcgtccgcttttaaatctggatagctttctgacaaggcgaaaacgcttttcaatgaatccgttaattgattagaagcctccattgttgcttgccgattatcagctggcatttcaaccaattgattccgcatcttgatgactttttccaacgtgtcttgttcatgcttagcataacctttcacggtcgatactaagtttggaatcaagtcattccgccgtttgagttgtacatcgatttggctccatgcttcatctgtccagttccgactcttgaccatgttattgtaggtgctgatatagaagccaaccgcgccaaccactaacaaaataatgataataataaaccacaacatacgcgtatcctcttttctttaatgttgtcttcatattatcagactcgctacaacaaataaagaataggttgccaaccttaacaaaaccttggtttgacataaatggtaaaattaaagagttaccaattttgggagggatacttgcatgtttactgcacagccagcaattgcgaatgttgatttaactgcaccacggatgattgtcgatgaccctcggattcccatgagttatcaggcactttgtcaaacaaccaatggcggttttttgactaactttagccttcctacgagtgagccaacaagtgatggtctcgccgacgttgagtgtcattatttagctgggattgctcacaacggtgaagcagtcatccaagcccccgacttgcccgattacttagtcccttttagtcagcatcaacagcagtactttgtatttgattgccaacaagcctcagctgaaccaccgattcgctacatagatactgaggtcgatcaatggttaaccgttgctgattcgctggatagttttctcgaacaattaggtcccaaagtaattgatctaaatccagataatgagttaacccctttgcagcgtaaccattacttgttagtggcacagggagcacagctagacactttgctagcccgttatgaagccgatgctgataaagaatggctgtttgattggctactctattttgccgaacatggtacaccagcccaacaagcaagcgcattgactgcctacgacactcagcggttgtactttaaacgccagctgccacgcgctaaagatgcgcaactgactgccctctttgaacaactcccacacttaaaagacgcctaccacgcacatcagcaagcgtggtcgccgctttaactttttagaatcgagatgatgacaccatgttgactaacattcgtcaacgtttattcagacgccgcgcacaatgggaacagaacctcgtcgttttatggtttggtaatttcatggccggggttgcttttagtttgattatgccatttatgtcgttatacattgacacacttggcaactttacaacggcccaactgagtttatggagtggggtgacctattctattaccttcttggttaccgctctgatttcaccatggtggggcaaaattgctgaccgccgtggtcgcaaattaatgttactccgcgcctcattaggactagcgattgtcctgggtgcgatgggcttagtccaaaatatttatgaattaattggtttgcgactattacaaggcttcttctcgggttatatcagtaattcaaacgccttaattgccacttcagcaccacaagaaaaaagtggtcaagctttaggcaccctgaccaccggaagtgtttccggaaccttattaggcccgttgttgggtgggattatcgcccaagcaaccggctatcgaacaaccttcttcattaccggtaccatcttgttcatcgtctttatcctctgtctggttttcgttcacgaagacttcacgccagtagaaaaaggcgatcaagtacccggtcggcaactgattcatgaattgaaatacccgcatttaattatcggcatgttcgtcaccacaatgattattcaagcctccaacaactcaattagcccgctgttgagtttatatgtccgtcaattaatgcatcatggcaataacgtagcgttagtcagcggagttgtcgcggctactccagggatcgcaaccttaattgccgcgccgcgttttggtgcacttggcgatcggatcggttccgagaaaattttactcggtggcttgatcttcgccgtcttcgtttacgttccgcaagctttcgttcaaaatgtttggcaactcggtgccctgcgtctgctggttggggtcgccgatgccgcattgttaccgcaagttcaaacgattcttgcgaagtactcaccccatagttccgccggacggattttcagttataaccaatccttccaagcaatggggaatgtcgccggacctttaattggttccagcgtttctggcctattcggttacagcggggttttcctatcgacaaccgttttagtaatcgtcaacctcttctgggtgcgtcagaatacaaaagtcttacgcgaagaacatgaaatacaaaaataatacaaaaaagtggtgtcgctcattttcagagcgacaccacttttttgttgaaacgtgctttttgtggcatatttctgcgcttaacagaatttgccaaatcggtgattacaatcgccaattcgtcaaatccagttaatgctcaaaatataagcgccacaaacgcactctattttttggtaaacatcagtttatctaaccagtcccggttatgtttaatacagaaatagccgataatggcgattaaacatgatcccaagacatccgctagtaagtcccccatcgtgtctaacaaggctgcttggcctaataaaaggtgaccttttgccatataacgttgcatgtttaagcctaacaaactatcgccggtaaattcatagaattcccacaacacaccaatcgtactcccaaacgttgccgcaaacaaactcatgagtaaggctgaaatggtttgacggagttgttttgaaatcaatacgttaaagaccgtataccctaagcccgccaataacccggcactcaagacatgcaagaatttatcccagtagtataagcgactataaaaatgtaatcccgtccccaataaaatcgaacagtatacaaagattaaataaactgcatatagaatctctggaaaccggtatggcataaagcgttcaatgataataggtaaggtcgcaatcaccaggcctgcaaccacttgtaaaacggcaaaagacaatgttccgttgtctttggggttagtcagcatttgttctaagtaataaccaatatagattaattgactcacaatggtgaagacataaagccaatctacccaccgccaatttgttttttgttttgccatgttattcatcctttccattcaaatgatacagcgtgacactccgactaagtcgcaagtatgcgatgaaatgaaagatattgcccagcaaaatcaacagtgcccctagccagctattaatctgaattccgacaatggcaatggcgtaaatcaagacacttcgtaagggatcatttttaatcgtttgataaaattcctcgtgtcgctgttcatactgacgcattagttcatgatgcagtgccatataccgatataatacccaaaacaaagctgagatgactaatgcaacaatcgcatacgatgtaaaagcaaatcgaatatcagcgccattttgttgagcaatcgattccgacaacaaactagttgggtaattaatcagtgtcactgcaaataaaatactgagattgatcacgtttaactgccagttagtttgttttattttcgcaaaataatcgtgatgaaacaaccataatgtccccacataaaaaaaggatagtacataggcagccaaagttggccactgtgcaatcaccgcttgactcaaatgccctgcttgatagtccggcactttaaagtctaacactaatagtgttaataaaatggcaaaaacgccatcgctaaatgcttgtaatcgatcgattttcattattctttccctcacaattcgactatggtcaaactagcgtgggtagtgcataatagttcataaataattcccttaactaggaggctctatgtcatcacctaccactaaaaccacgcagtttaaaattatttttgttttatatagcttacttttaggattgttgattggtggcatagcggccgcctttttagccctcattaatttcagtacacacttaatttggcaagtcggttattcgcatttcaaccagccattttatccgttgcttgttggtctatttggcggattactcgtcggcttaatgcaacgttattgggggccttatcctaaaacaatgcatgaaacactcagcgaatttaaacaaaccgggtccgttgcctaccaacagcaagtcggtaaaaacattatcgccgccttagttgtattagcctgcggcgctagccttggccctgaagccgcgctctcgaccaacgtcggcggcctaatcacttggttgggcgatcgacttaaactaaagaaacgtttttgacgatggggattggtgccatgctagcggccatcttccacgcaccgctagccggtgttggtgaggcgattgagacaacctccttgcgcgatcatttcaaatcacacttcaatcaagttctattatacattctcacaaccgcaactgggattcttggtttcgccttggtcaaccaactcttccccaaagaaagtccatttacactgcacacaccaatcattcattggacattaatagtttggccacttcttattttagcattaattgtcggttgagtttttggcaatctattcttaaaaatagaacaatggtgccagtggctctttgatacgattcagcggccggtcttacttgcaatgatagctgctggtgtgttcttgggtgcttgtggtctattgtcgccttatttactcttttctggagaacactacttgttcacctttaccaaatccggtttagatcaatcattcatttatttactcttaatcggacttggaaaaaccgttctaactaatctgctatttgcctttggttggcggggcggtaaaattttcccagccatctttgcaagtgcggcaatcggtttaagtctcgccgttgtattgccatacactcccggcctcctggttgccacggttgtcgctgtcagttgtacggtgatcgtggcgcaaccgtacgtcactgctactttgttactctttcttttcccgattcaatttttcccagtcattttgctagcgtgtctcgctagtcatcgaattcaaaaaatgttgattaaatagctgattgccgtttgcaattggctatttttatggaaaaaaaggcaaaaaaaaaccagggaaaaattccccggtttcaaaataattatttggcagcgttcttgtctgcaaaaccatattttttgttgaaacgatcgacacgaccatctgcttgagtaaacttttgtttacctgtgtagaatggatgtgaatctgatgaaatttcaacacggattaatggatatgtgttaccgtcttcccattcaacagtttcagctgagttagcagttgaacctgagatgaacttgaagccagttgatgaatccataaatactaccttgtgataatctggatgaataccttgtttcatgtcttttccgctcctttttgctaaagttatctgcatcaattcagatgcacaacttaagtcttgccctgagatatttgctatgtcagagatatttgtttacataaccattaaatattagcatgaatgctaacaaaaaacaatagatggttaacttattcttcaaccattttgacgattgcgcccagacccgttagtttatcaacaacgcggtcatagccccgcaaaatattacttgcgttatcaatcgttgtcacaccattggccattaagccagcgatcattaaacaagcaccgccccgaatttcatcggcggatacttcggcaccttgtaacttgtcggcatgatgtaaaataatcacatcattttcgattgagatatctgcacccatccgaattaattctgggacgtgacgtgttcgtttaggataaagggtatcaaccacaatgccttcaccttgcgcttttaataagagcggcgttagtggttgttgcaaatccgttgcaaagccaggatatggcatagttttaatttgaaccatttttaaattaggtgatggataaacgaagatactatcttccttaacatccatcttaacgcccatttcctctaacttagcgaggtaagcgtccatgtgttcactgatgatgttcttgacgttcacgccatccccgatggctgcagccatacttaaataagttcccgcttcaatccgatcaggaataatggtgtgtgtattgcgcccatacagatgttcaaccccatcaatgcggataatgtcagtcccagcaccgcggatcttagcacccatgttgttcaagaatgtcgcgatatccacaatttcgggttcgcgtgctgcattttcaatgacagtttgtccttcagcacggacagcggctaataataaattaatcgttgcgccaactgatgccatatcaagataaattttagcaccgtgtaagccgtttggtgccttaatttggatagcaccgtggttattagtcactgtcgcaccaagtgcttcaaaccctttaatatgttgatcaattggtcgtggaccaatatcgtcgccacctggaagcccaacgattgcttccccaaaacgacctaataaagcccccatgaaataatatgaggcgcgtaaactttgaatcttcccgcttggaagtggtgtcgaaataatgtgggttggatcaatttcaaccgtgtcatcaacaaaagtagatgagacagacatatcttctagaatggatagtaggctgttgacgtctttaatgtgcggcacacagtctaaaacgactttcgactccgccaaaatagcagcgggaataatcgcaaccgtgctattctttgcaccgccaattgtgacctctccagataagagattgccaccttgaattaacatttttttcatttttagatttccccgttcgctctgcaacaaaagaaccgccttcagtttcccacttctcctgtggtttaaaccagaaggcgcttttgatatttttaagtttttagttttattttttaaaattggaaaacggcttcaatctactcaatgccgttgataattagtcatacatgtataataataattaatcagcacataaattacaaggcatttagggataacatttactttttaattttcatacttagtaaaagctaatcatcgcattcaattgggctatcgaagtctaaaaatgtaaggcttttcaaaacggaccatctccattttcacaactatttttcggcatacaaaaagacgctactttgtcgtgatgactagtagcgtcttttatgaaacgtgcttcctcgaactgccttttccggttaacctaaaaataaggattatggctaaagaacgccataatccttattttcttgttaatcctcaaagccaacccgttcgagtcagcactctacattgttgcgccaataaatgccttgaacaagccttctggtttgtttgggcgtgataggaattctgggtgatattgagctgccacgaagaatttgttttctggaatttcaatgacttcgactaagcggttgtcaggtgaagtcccggcaaagactagccctttgtctgtcaacaattcacggtattcgttattgaattcataacggtgacggtgacgttgttggataacactttggttatcataagcagcagcagtctttgtacctggttttaatttacatgggtataaaccaagacgttgtgtcccacccatgttttctaaatctttttgatctgacatgatgtcgattaatttatgttttgcttctgggtgtacttcgccagttgttgcatctgtaatgccagcaacattgcgggcaaattcgatacttgccatttgcatccctaaacaaataccaagatatggtacatcattttcacgcgcatattgaattgaaaggatcatcccttctaaaccacgatcaccgaaaccaccagggacgataatcccatcaaagccagctaatgtttcagcaacattttctttcgtaatatcttctgattggattggtgtcactttaacatcggtgttataagcataaccggcatggcgtaatgcttcgttcactgaaatgtaagcatcttgcaattcgatatatttaccaaccaaggcaatcttcttcgtgccttcgaggttcttgattgtgtgtaacatatcaatccattctgtcatgtcagcttctggtgctgtcatcttgaagtggttcaagacaaaatcatctaagccttggttcttcaataacaatggaatatcgtagattgattcagcatcgcgtgattcaacaacggcttctggttcaacgtcacagaattgggcaatcttgttccgcatgtcatcaggaattggtttttcagtccgacaaaccaagacgtttggttgaatcccgatgctccgtaattctttaacactgtgttgtgttggtttggtcttcatttcaccggcagccttcaagtaagggaccaatgtcgtatgaatgtagatgcagttttctgcgccaacatccgccttcatttgacgaagtgcttctaagaatggtagtgattcaatatcaccaacagtcccaccgatttcagtaatcacgatatctgaatcagtcgttgtagcagcccgcatgattttttctttaatcatgtttgtgatgtgtggaatgacttgaacagttgcgccaaggtattcacctttacgttctttacgtaaaacttctgaataaattttacctgtcgtcacgttagaatatttatttaaattattatcgataaaacgttcgtaatggccaagatctaaatcagtttcagtaccatcatctgttacgaaaacttcaccatgttggtaaggactcattgtaccgggatccacgttgatgtatggatcaaatttttgaatcgttacctttaatccacgattctttaacaaacgaccaagtgaagccgcaacaattcctttaccaagtgaagaaacaacgccacctgttacaaaaacatatttggtcatataaatattctccttttcttcttagcattacgctaaacattcatgcttttgggaaacaaccaaaaacaaaaacaagctccctattcaaaatgaacagggagcctgttaaccgattctggcttcgcaattaaagtaactgcaaagcgcccaaagaatataatacaagaaatggcaattagcgtcaagcaaaaaaattagtcatttctgcgccgattttaaatcgcctatgctacactatttgcatgacctactttgaaaggatggcccaccatgctacaagacgcgttactagctctagatatcggcggttttgccgtcaaatatgggatttggacgaaacaccaactaattaaccaagcgcaattccctacaccgctaacacgcaatcgcttctattccgaagttgaacaattacgtgatcaatttgcgaccgactttcatttaactggaattgcggtgagttgtcctggcgatccagatgaacagactggcatcatccatggcatgagttatgtgccatttttgcacctcggtgaatttcaaactgaatttgcaacgcgccttggtctgcccgtctctctccaaaatgatgccgacagtgcagcactcgccgagatgacagctgggattggtcaaggtcatctgagcgccttattcacaataattggttctgggattggcttatccattatcgaaaatgggaccattctcaaaaccactgctgataaaatcgataacttcgaaaaattcatcgcagatgccattaaaacactcaacaattcaaaagtctcacccgtccaaattggcaagactgtctccctccgtaattttaaactccccaatacaatcgatggcaaaaccgtcttcgaacttgccgatcaaggggatccgattgccacccaagaagtcacacagatgtatgctgcccttgcggaaatcatgctctttttaaacgttgcttacacgcccgagattattggtgtcggtggtggcattagtcagcgaactgacctactaccaaaattaaacgctgcgattgacgcacttttagccgatgacaatagtagtattaatcgttactggcaacgccgtgcaggggcaaccacccctattcctgtgccacacatcgaaatttgtcacttcaaccaagacgccaacttaatcggcgcggtttaccattttcttgaacgagagtgtgtcgtaagtcgggtatccgacgaggattagcttaaaaatattaaacgcaaaaaaaagacgccaaagttaactttggcgtctttttttatggcaacgaatcggaaacgtctaattaaagctcgtcatcttcgtcttcgtcgtcttcatcatcatcgctaaattcagataattgaccttcgataccgtcttctaaggcatcgtcgtcttcatcatcgtcatcgtcaccgatgttttgtaagtcagctttgtattcagttaagtcatcaccagcaacgtcatctgtagctgctaaatcaacatcatcatcagcatctaagtcttcgtcttctggatcatcgtcactgtaatcaatcacatcgtcatcgtcggtaacatctgctaagaatgcattaaccttcttacgacgtttcttcttagttggttggtcttcttcatcttctggatggttaacttcttcatcgacagattcatatgggtaccaagaacggaggccccaaacgttttcgcctaaagaaatgaaactaccatcttcatttaaatccgtataaaattgtgataagcgtgcacgcacttcttcatcacttttgcctaaatagttttgaatttcattcgttaagtcagcgaatgcaatcgtgtcgcctttttcttctaaaattgcatgtgcgacttcaatcattgatagttcttctttattttggcctttaaaaacgtctaatttcaaccagtacacgtcctttcaacagtctatccttaatcatactagcttaagctgtaaaaatcaatcgtaatttgtaatcccccacggcttgattattgatggcaagttggtaatgaaccgtaatttcacctgataacggttgttccttcaccatcgataataaatgggttgtcgttgtgagcactggcatgttgccatattttgtttggtaaattgatccgaggtcttcgccttgcttaaagtacaaccgcaattgcgtctcgtcttcttctgtgccccgcgttaattgaatttgaccgtcagcagccaatttaaaccgtaccgcggtggcttgttcaccaccgtgttccagataacgtaagtaaagtgactctcccattttgacaacttgaccatcctcatcgaaaacgtgtttttcaagttgcccatcttgttgaatttgcgtttcaaggtgtaccttgaccggaattccgctttgacttgccataaataacttcctttaattttaattaagtagttctattataagccattcaaaatttgagcgccagaataatccgccaattctctttgaccaacgtaccgattgcagacagcgcctagaatttacgctataattaagaagagtttttaattttcggaggtgattaccatggatgatttagcgactttatctgccaatcaagaatgggctattttaacccaacattttgaaaaagcggctggaccactcgcttttgctcatgctaatagcctcttagctttgagccgcgaattacaacaacctattattcatttttggacgcttgctgacaatgttattttgggcatgatggatacaaagttacctgcttatccacaagcggttgccacattagaggctgcacactatgcccatttcgtgcgtaacgctggtggtttggggattgtgacggatgccggcgttttgaacgtcagcttctatcttcctgatatggcggatcacctaagcattaatgccgcttacgcgctcatgcaccaattgttcacaactgcctttgcagactatcccgtcacgattgaccatttcgaagtcactcactcctattgccctggcgaatacgatctcagcatcaatggtcaaaagtttgccggtattgcccaacgccgtgccaaaaacggaattaccgtactcttatacgccagcattacaggcaatcaacaggcacgtggcaaactcatgcatagcttttacactgctggccaagcacaaagccaaacgcggtggactttcccagcggtcatcccggacaccatggccaacctatctgatctgttaaacgtaccaatgactgttgcaacagccattacgcacctacagaccgcttttagccggttggttcaacaaccacaactagttgacctcacaccacaattacaaacgaaagcttatcaacaacttctacttaaaaaccaaacagcactccaccgttatcaagtttaacgggcctcaaaaaggagattatattgtgactaacaccgctattaaactatcgcgtgaaaaagtattccgtgatcctgtgcataactacattcgcgtcgagtatcaagtgattctcgatttaattgacacccccgaatttcaacgtcttcggcggattaaacagcttggcacgacttcctctgttttccaaggcgctgaacattcccgcttcacccactcattaggtgtttatgaaatcacacgccaaatctgtgatcaattccaacttaactaccctagtcaagttgccggtgatggactttggaacgatgatgaacggttagtcgccttatgtgcggctttattgcacgacatcggccatggcgcttattcacataccttcgaacacatcttcaatactgatcatgaattgattacgcgccaaattatcaccaacccggagacagccattaatcgcgtcttaacccaagttgcggatgatttccctgcgaaagtcgctagtgtaatcgatcattcttatccgaatccacaagttgtccagatgatttccagccagattgatgctgatcgcatggattacttattacgggatgcttacaatactgggactaaatacggagaattcgatttgacgcgtgttttacgagtcatgcggccttacgataagggcattacctttttagcaaacgggatgcatgccgttgaagattacatcgtcagtcggttccagatgtatcaacaagtttatttccatcctgtttcacgcggcatggaagttgtcttgcaaaagctcttgcaacgtgcgaaagttctttatcaacagcctgaccatcatcagagtctcgcaccgcaattattgattccatttttcgaacagaacttcaccctacaagactatttaaaattagatgatggcgttttgaatacctattttctatactggttagactatccggattcagtgctcaatgatttggccgaccgctttttaagccgccgcccactcaaatcggttgcctttagccaacagacccaacgtgttttaccagaattacgggcgctaaccgagcaagctggttataacagtgagtattacactgctgttaataacagtttcgatttgccgtatgacgcctatgatccctccgctaaatcacccaaaactcagattgaaattatacaatctgatggtcaacttgaagagttatcatcattaagtgacttggtagccgccatctcaggccgttttagcggcgatgaacgcttctatttccctaaagaaatgctcaacgaaaatgatatcgaagtcttcgcaccaatataccgccagttcaaagcatacttgcgtaacggtgcaatcaatcctaaccactaaaaagtctagtggtaataagtcaagaagataattgatataaatatcgtgtaattttacaaaattggcaacactaaactaagcctacttaaaattcataaaaattttagtaggtattccaaagatttgcgtgaataactacgttattccttcaacacactctttggtggtgtgtaaagttggtgattgcgtagtagcgcatcaaccaaacgcacaaattttctggcggttaaaacaatagctcggcggtgcttatttatcggggtttcggtatatttctttttataaaaagctgtgtattcaggtaagtgattttttaccgagttggcggcttcaactaagtaataacgtaaataatgattaccttgttttgttagtggtgtgacttctgactgataatttccagattgtttaactttccaggatagaccggcatatttggcgacttttgcttgatcatcaaatcgttcgatttgaccgacttcagctaagatacctgcggcataaaccttaccgattcctggcacactggttaagcattgatattcaggaattatttcaactagtttttcgatacctttatcaatttgtttaatactttgctgtaatgaacgcatttgaactaccaaggtactgagaataatatcaatcgactcattcattaatcgcggcaactgatagctatttttaatggcacgctgaatggttttaaccagtttttcaggatttttaaagttactgcggccaacattttgaatcaattggacgaagtcctctagtggtaaattggctaattcatctaatgagtagttttcagtcattaaatgtacaattgtggcgctaaaaatgccggtagattctgattttaattccttactaagcgtattacatttataagttaagttttctaagaaatgttgtttaaccgttactaattcggtaactagttgatatctagtacgggttaaacgttgaagtgccatatatttttcttctttgataggtgacgttgtaaaacgttgaattcgtaagtagtcagcaattcgcatggcatcattggtatcagttttgtcttcatcgaagacacgagaatattgcttgattttaaatgggttttcaacagtgactaccgttggtagtgcatttaagtctgcatcttcttggaaaaacatagctggatgaaaactatatagtgatgttgattccataccaatcacaatctgttcaaatgatacttctgcgtgatgttttaaaattaaggctttaatttcagaagcaccatttaaatcgttagcaacacttaaacgatttaggattgataagttactatcatcggtcataaaacaagcatcaatcttttcagaactaatatctaaaccaacaaataatttcacaggaaggacctcctttcgagagttatttggaacttgctttgatactgcgggattccccagaaaatctttacacagctacaacctcgcgtaacagaattttaaccaattggacttatgccgccttcaaactactacattgaagataagcctgattgaaaacagctagtgagttgggagagagcgtaaagactcgggtaacggacttactaaagtagagttaactacaggagtttttagcaaattcccgatagatccattccatggtcctattatattctgaagaatcccgcagtatcaaagtaataattaaattttattgtaagccaacggcttataaatatatcttacgaggagtttttataatgtcaatcaaacttgtcgctgtcgatatggacggtaccctattaaatgaaaataacatccttagccctaaaacaatcaaagttgtcaaagctgctaaaaaacatgacgttaaagttgtgctatgtactgggcgaccactcaccggggtcacgccttttctaaaagaactgggtttaactgaagccactgactatgtgattacgttcaacggtgctttggttcaaaatacggcaactggtgaaattctagtgcgtcacactcttgcgcatgaccaatatcttgaacttgaaaccctctcccgccaaatcggttctcatttacacgctgaagacgatcaattcatctacaccgccaatcgcgatatcagtccttatacagtcggtgaaagtgccctcgtcaacatgcctgttcgtttccgccatgtcgatgaaatcgcacctaacaaggccttttcaaaagtgatgttaatcgacgaacccgccgtcttagctgaagccaaaaccaagattcctgctgattttttcgatcgttatcaatttgttcaaagtgaagcctacttcctcgaagtactcaacaagaacgccggtaaaggaaatggtttgcgtgatttagcaaatgccttaaatattgatcaatctgaagtgatggccattggtgatcaaggtaacgatttatcgatgctagaatacgccggcttcccagttgccatggataatgccattcctgaattgaaaaaaattgctaaggttgttactaagagtaaccatgaaggccaagatggcgtggcatacgccattgaaacatacgcctttgaaagccaagcctaatcataaggggagttattatgactacgttaattgatctcgtttacgcgtccccccttttctttttgattttatttattggtttacagcgatttgaaaaacgccgattaatcaacggcattgtgtttaactttttcctcttcagcgcattaatggatgctgcgctcattgtgattcgcctcaataacgaaacgctgaataacattgcaattgctgctgccattgttgtcgttctaatcgtcatgttcttctacttattcggtattgtcttgttgctgtggaacgcgtatattgtctggaaaaaagaaagtcacacgttatccaacatgctgaccctcctcattgcgttagccatcattggctcatttttcatcccaatcatcacgcgcttgttacacattcccgccgatattaaattatttgtcagcataattgtatcggtttttcttttgtatattccattgttcttctatttatatctaacctcactgattatctatcaattcaaccgcccccgttatcaacaagattacatcatcgtcttgggtagcggtttaatcgatggtcaattcgtcccaccgttactggccagtcggattaatcgcgccattcgattttatgataaacaagtcaaaaaaggccgccctgcaccaaaactggtcttttctggcggccaaggtccggatgagaagctgcctgaatcagttgccatgcaacgttacgccattgagcaagggattccgattaaagacaccctcaccgaggaaaaatcagtcaacactttacaaaacatgcaattttcaaaagacattatcatggctgataccactaaatcgaatcctaaaattatttttgcaaccaataattaccacacattccgcgctgggctttttgcaaagcaagcccgtttgaaagcagatggcattggcgctaaaacatcgcgttacttcttaccaaatgcaatcatccgtgaattcattgcaattctcaaaatgaaacagcatcaattcattttagtcgcaattgcaagtgtcgcatttgcagccttaactgttttactcaatcatatgtaacgtaaaaagccgttgtggacaatttgtccacaacggcttttttatgatgcctatttagcccgtgctgcacggacataatgaataatgagcgtcagtagaataacgccaaacacaattccagcaaacactaggttaggaatttcatagtcaatggctggaatcgacaagaataatttaatcgcgatgaagagaattaagatgtaagccatcggatttaattccggaattttcttcatcaattgggcgatgagttgggcaatcccccgcatgcagataatcccaatcattcccccaattaaaacaatcaccggattactagaaatcgctaaagacgctaatacggaatcaattgaaaaaacaatgtccatcaattcaatcgaagcaactgtgcgccagaaccgatgcggactactgattttagaacccgcctccggtgttttagcctgcttcggatgcccactctttctgaaataagcaatgactaagtaaattaaatacaatgaaccggcaactttaatttcccacaaatgaattaaataggtgccgacaccaataataatgaagcggaaaacataagcgccccataagccatacaccaatgacttttcttgctcaatttttgtaggtaatgtttgtgtctgtgccgctaatacaacagcattgtctactgagagtaagcattccataatcactaacgttaaaattaaaagccaatcttcggacgacgtaatgacagtttgccaattactcagttcaaagaatggttgatacaattgtacaatccaattcatctaaggttcctctatctctaatttctgttatttaattcctgtgactatcttaacgatttttcatgaaaataacaaatttattggttaattatgtaactagcacagcatttttattttataggctctggaaatacggtatactttttatagtaataattaataatattaatggaggtcgttttcatgattaaagaatttaaagaatttattatgcgtggtaatgtgctagatatggctgtcggggttattttgggggctgctttaaaaagcatcgtggactcattaacaaagaacttaatcaatccaatcatttcattattcgttggacaagttgatctatccggtattgcgcttaccattccaggcaccaaggccgtttttaaaatcgggaacttcctaaacgatgtgattaacttcttaatcatcgcatttgttgtcttcttaatcgtcaaaggattcaacaagcttcgtgacatgggcaagaagaccgaagaagaagaagcacaagtagtcgaaacgaaagaagaagtttacttaaaagaaattcgcgatttattagctaacaaagaaaaataaagtcacaaaaaaacgcctgaacaaattgttcaggcgtttttaattgttagcttattgaaatgtgcttccccaaagctaacccgttcaagttagcacgcttatcttttaaatctgttttcaaataatggactgactggtttgttttcatggattcgtttgatggcgtccccaataagtggcccgacagaaacttgtaccattttatcgattaatttttcttttggaagattaattgaatctgtaacaatcatttgcttaatcactgaatcttcgattcgttgaatagctgggccagacaataccggatgtgtacaacatgcgaatacttctgttgcaccagcatctttcaatgcttgcgcagctaacgtaattgtgccggcagtatcaatcatatcatcaatgatgattgcgcgtttaccgttaacattcccgataatattcatcacttcagaaacattcggtcttgggcgacgtttgtcgataattgcgattggtgtctttaagaaatcagctaatttacgagcacgtgtaaccccaccgtgatcgggtgaaacaacaacagcattttcagccaagtcattgctcaagaaataatcagccaataaaggagcacccatcaagtgatccactggaatatcgaagaacccttggatttgtacggcatgtaagtctaatgctaaaattcggttagcccctaccatcgttaacatattagccactaatttagcggtaatcggttcacgtgagcgagccttacgatcttgacgtgcgtaaccataataaggtaacacaacattgattgttttagcagatgcacgacgcaatgcatcaatcataatcatgatttccatcaagttatcattaactggtgcagatgttgattgaataatgaaaatttcgtcgccacgaatactttcttcaatattaatctggatttcaccatcactaaaacgtttaacagaagattttcctaaaggaaccccaacttcagccgcgattttctcagctaagggcttattagagttcaaagcaaagattttcaacttagggtcgaaatattgttcagacatgtcagcctccaaaaaatttatgttagtacctatttaaagtttaggcattttcaccccggaaatcaagattaaaacttaaaaagttcacaaatgttgtaaagtaagcgctgttcattagaaacgtgagagaaaaagaaaaagttaatagcgattaccatcgaacctcccgtttagtatcccattatatccccaaaaatgcttgtttattttggattatggattaaattgtcatttagcgcaagacaaggtacactcattgaaaaaggcggttactatgacccgccttaaatacactatttttaataatctctatcttttaattctggtaattattattacttccgatcgcttatttcacctcagcatgccctattttattcttggtcttattctattcgttgccgttttgatttatcagtatcattttttctaccccagtcacccgaactacaatcctaaaaattatcgcattacaaaaatgggctgggcaaccaccgctgttgggtgtcttatcatacttcttctaatcttattttcaagtggttcaatttggatttggcccgcttttctaatcgccttcttaatacgcgattatttctcaactttaaaataactacaaatatcaaaaaaatcgtccgtaatctcaaaaataagattacggacgatttttattttaagatgtgctttacaacactaagctaatcatcataaacacactttaatccaaaacgtgcttcttgtcaccgtaatttccgcttaatctaacatcgtattaatgctcaattactaaccgcgacagccagcactctattgccattcttcgtcatttgctactggtagttttgcccagtagttttctttgtttgtttgacgggcacgggcgatggccattgccttttctgggacatcatccgtgatggttgagccagctgcaatgaaggtgtgatctgcaatttcaaccggtgcgacaatgtttgagttgctaccgatgaagacatggctgccaacatttgcgtggtgtttagccacgccatcatagttaacaaagactacgccacagccgacattaatatcagtgcctaatgtggcatcgccaacataacttaaatggccaatcttcgtgcgatcgccaattttagcattcttcacttcacagaagttcccaacatggacgtcttcgccaatttcagcgtttgggcgtaaatgactgttaggcccaatgtttgaccccgtgtgcatgatagctgattcaatcgttgaacttgtgatttgaatgttgtcttcaattgttgaatcaataatagttgagccagcaccaacgaaacaatctgaaccaattgttgtgttcccttttaagacgacgttaggttcaacaattgtatcattaccaatctgaacgcccacttcgatataagtattttttggatcaattaatgtcacaccattacgcatgtgttctgtattgatgcgtttacgcatcacttttgttgctgcagcaagagcaactcgatcattaacacccattgattcttcaaagtttggcattctgtaagcagcgacaatttcgccttttttcttcaagatttcaaccacatccgttaagtagtattcaccttgtgcgttctcattcgtcacttcgtgcaaagcttggaataaggtcttgttgtcaaagcaataaacgcccgtattaatttcattaacagccgcttctttatcattagtatctttttgttcaacgattttttcgacaatcccgatatcattccggataatccggccgtaacctgttgggtctggggccgttgctgttaaaatcgttgcctttgcgcctttatcatggtggtatgcaaataatttttcaaaggtttcagcggttaaaagtggcgtatcgccactgaccacaatcgtaatgccatcttcatctttcagtaaagcttcagcttgtaaaaccgcatggccagtccctaattgttcagcttgtaatgcatattgtgaccggtcgccgagataatctttcaccttttcagcgccgtgcccaacaattgtgaccacattggttgggtgcgttctttcaacttgggttaaaacatgatctaccattggtcgaccacaaacctcatgtaatactttatataattttgacttcatgcgagtacctttacccgctgctaaaataattgcatttttattaaccatcataagctcctcgtcattcgtgattactggtctattttagcttaaatactaggctagagcaagctaatccgtattgaagtttagcgctttatcccgtatactggaggtactttattgcggaaggaagtcggccatgccaaaactgacaaacaacattcgattaatgctcggcagcatcattgttgccattgccttactagttggtgggtattggtctacctcagctcggcatcaaacacaccaagccgcagtcacgtcctctaccaaatcacaatcgcatgcgaggcaacaatcgataaaatcaaaaaaagcggctcacccgacaccaattgactggcgtgcgccttccgaaaacaaaccatatcctaatttagacgaacaacccgatttatgggtcgacgtttcaattgcacagcaacgtgtctaccttaaaaatggcaatgatcttttgtacacaatgcatgcttcgaccggttcccctgagtcacccacaccaactggtaccttctatatcgaagctgaacacggcgactcatttttcaatgcaaattccggggaaggtgccaaatattggcgctctttcctagatcatggtatttatctttttcacagtgtgcccacagatgaagctggcaatttcattccagaagaagcagagcaattaggcaaaaaagctaattcacacggctgtatccgtttatcagtagctgatgcccaatggttctataccgcaattccatataatacaaaagtcgtcattcactagcttgaatgacgactttttacttaataacgttcaaaaggagatgccctgatgactcagacaacccaaaaaacgattgccacggcttttaaacaattaatggttgaacaaccttttaataaaactagcgtcaccaccatcatgaataaaactggcattcgacgccaaaccttttatgactatttccctgataaatatgcgttattagattggatttacgatcaagaaatcggtgtctacatcgacgagcatctcagctatatccattggacacaggtgttggcgcaactatttaactacttcgatgctaaccgcgccttctatcaaaatgctttgtcgattgaagggcaaaacgccttcgaacgccattttattcatcacgtccaccaactgattaatcggattattcaagatcttgctagcgcccatcacattacgttatccaccgactaccaagcctttttacttagttttctttccaacgcattagttgcttacaccgctgaatggctccgcagtcgtcatccccaatcagtttcaaaagtaatcactgccctaaaaatgacattaactgatacaattaacggtttattattacggacaggacacttatatgaacaacggtaattataagataatcccatcaaaatttaatttcatatttattgaccattcttagcgtagttggcttccacgactgctttttctgcttgccaccagtcttcattatcacgataccagtcgatggtatgttgtaagcctgatttaaaatcagtgaattctggttgccagcctaattcttcccgtaacttcgttgaatcaatggcatagcgtaagtcatgacccggacggtctttaacttgatcataagcatctttgggttgccccattaattctaagattaattccaaaacatttttgttattttgttcgccatcggcaccgattaaataagtttcaccgattttacctttagttaagatggcccaaacagcgcttgagtggtcattcgtatgaatccaatcacgcacgttttgacctgaaccataaagcttaggacgaatgccacttaatacattagtaatttgacggggaataaatttttcgatgtgttggtatggaccgtagttgtttgaacagtttgaaatagtggcttgtagcccgaatgaacggacccaggcacgcactaataaatctgaactcgcttttgatgatgagtaagggctacttgggttataacgtgtttcaggtgtgaatttttcaccagcaccttcaccatgacctggtaagtcttcgcgcaatggtaaatcaccataaacttcatcagttgaaacgtggtggtaacgcacgttgtatttacgacaagcttcaatcaacgtatatgaaccgatgatgttcgtttgaatgaaaggtgatggatcttttaaagagttatcattatgactttctgcagcatagtgcacagccgcgtccgtcttttgaactaacttatcgactaattcagcgtcacagatgtcgccaaccactaattccacacggtctgctggtaaaccggctaagttagcgcgattgccagcgtaagttaatttatctaaaaccatcacgtgaacttctggatggttattcaccacataatgcacgaagttagaaccgataaagccggccccaccagtaacaataatatttttcaacctgaatcctcctaataatatgttaatcatagtattcattcttaatttatttaaatataacagcaatatctatttaatacatagcttaccgtattttaaaatcgcattaccgtcctcaacaatattttaaagttattactagttacattattaaaaatcatcttttcttttgaatattattctatataaaaaactgcttaaactcagtctccaaaacagacatcattttaagcagtttttacttcttatttaatcttcaacggtgctaattgggcttcaattgcagctaaatccgtccctgcttgcaacaatgccgctgccgtatagcaaccttcgattaaagcaacatcgtatagatgcaccgttttatccgttagttcttgggccaattcgaggttcatcttagcgctccctaagtcgtagaaggctaacaattcttgcccggcattggcttcaaaagcactttgaatcttcattgcgctagtcccaataccaccttcgtccgtgccaccagcagtcgttactgaaacatcagcggcaacttctttaattaaacgcgctacaccggccgcaatttctggtacgtgagaaacaatcacaacaccatattcactcatgataatacccccgccattaacattgtagtaaataaatacccactagaagccgcccctggatcaacatgtccgattgagcgttcaccgacataagatgcccgacctttggttgcttgcatatctttggtcgattcgacggcagcttcaattgcagccacatctaaagtaccatcttcaaccgctttgacaacgggagcccaaacgtcaatcaacgtcttttcaccaacttgtgcatgcccgcgtttttgaattccttctaaaccggctgccaataatgggccgacttcaagtgtcgtactgcttagttttgccatttctaaaaaggctgtcccatagagtggaccagaagccccaccaactttgctgatgagcatcatcgcagtcgttttcaaaataccttgtacatcggttggctgttgcttggtcaatgcttcatgcacagctaacaagccccgcgacatgttattaccgtgatcaccatcaccaatcggtgtatcaagttcacttagataatctttttcagcttgaatttttgcatcaaacaattcaagccatttcaatgtattttcaactgttaacatggtatctctcctttaccaaccaatcgttgtgactggttcatctaatttagcaacccaaccaggttcaattaatttcataattgttaatgacacaccggccatatctaaagaggtcatataattgccgacttttgtgaagtcgacttcaacattttcagcggccaagaggtccaagacatcattcataaagacgtattgttccatcagtggtgttgcacctaagccatttaccattaccgcaaaatgttcgccggccgtcatgtggtgggcttcttttaacttgccgactaattcagttgctaggtgtttcgaatcttgtaatttttcacggcgataacctggttcaccgtgaatccctacaccatattcaatctcatcaggcgctaattcaaaccccggttttccgacctcaggaacggttgcgccagataaggcgaccccgattgtcttaatattcggtgtaatttggtgcgctaattcttcaattgcttcgataccagcaccttgacgggcataagcacccagaatcttgtggacgaagattgtccccgcaacaccacggcgtccttgcgtatacgtactattttcaacagcaatgtcgtcatcaacaacgattgagcgaacgtcaatatcatccatagccgccatatccttcgccatttcaaaattcatcacatcgcctgaataattcttaatgactaagaacacaccacggcccgcgtcagctgctttaattgcttcataaatttgatcaggtgttggtgatgtaaagacttgtccgcacacagcggccgtcaacatgccatcgccgacaaaaccagcgtgcgttggttcatgaccactaccgcccccactgacaatcccgacttgtggccgatgttttaaatcggcgattttcatcactgcttctgttcctggaatttgtttgagttggtctggataactccgcactaaaccttggaccatctccgttacaatttggcttggatcattcattatttttttcatagtaacctcctcttaaatataacttcagtctatgttaccgctgtcatttatgcaacggacaaagcttggaaactgtccgaaagcacttcaaataaaaaaagcacccgcacaattaacctgtccgggtgctatcaaatcgtttaagctaagcgatctgcattctttgttaagtaattaccataactgacacttaacgttttattttcaatatcaactttatcaaccttcaagattgatgtgtaatcatcaaccatccgattgccttcgaaatctgattcagcaaagacagaaatgccaaccatttcagaatcaaactcttcaatcaagctcttcatcccattgacggtgccgccgcctttcatgaaatcatcgacaattaagactttggaattttcaggtaagctgcgctttgaaagttccatcttttcgatgcgagctgatgaaccagaaacatagttcacactgaccgttgaaccttcagtaatttttgaatcacggcgcacaattacaaatggcacatttaagtacatcgcaacgctctgtgcgattggaattccctttgttgcaacggtcataacagccgtcacttctttacccacatattggttggcgattaaacgcccaacttgccgtaatacttctggacgtccaagtaagtctgataaatagacgtaaccaccaggtaataagcgatcattttctgaaagccgttgtgccatctcagcgataaaagcttctgcttcatcttgtttaatcattggcatgtagcgcacaccaccagcagcgcccggaaccgtttctaagatccctgtgccacgattaaaaaaggtccgcttcacaattgataaatcttcactgattgatgacttagctgattcgtaacggtttgaaaagaatgtcaatggaatcaacgtatgtggtctttctaataaatagcgtgtcatatcgattaatcgatcgcttcttctaactttcatgttgaatacccctctatatattactttactgttatttccgaaaaaaactgtctaccaatcaattatatagaaatcttcggttaaatcctagtcttttttaaaaaaagagcttaattgttcgcttttatcccattaaagcgattcctacgccaattaaaaacgcctcaaccatttgattgtcggcgttttattatggtttcaatggtttaaccagatatacctcagcgcaaaatccggacatactattataaatccgttgagcccgtgaatactgactacagataccaaataccgttggaccactaccactcatctgagcaacatccgcaccaaactgcaataaccgctcacttaattgcttgataactggataacgttcagtcgtaatcggtgctaaaacattccccatattgcgagtcattgcatttaaatctccagcttcaacggctgcaaccagcgcctcagtttgtggatgctgttgaatctggtcgcaatccaatgcacgaataatccgcggcgtcgaaacactgacttccggtttcacgacaacgacccaaaaattcggtaatgacccgagtggtttgatctgatcgcctttgccagtgacaagggcggtttctccatatacgcaatatggcacatccgaatcaatttgtagccctaatcgcgccaattgttcgcgcgttaaaccaagttgccatagttcgtttaacccccgtaaaacagcggctgcatcagaacttccgccgcctaagccagccgcaactggaatatgcttatcaatttcaattaaagcaccggttggaatctgataggtgtgttgtaataattgagctgctttgtaggccaggttacgctgatcttctggcaaaaagccacttgatgtgcggacctcaattgcgggatcatcgcgtaatgttatctgaacatagtctgccaaatcaatcgacgtcatcaccatctgccactcaggttccccatcgtcatgtagaaagagtgcatctaaactgagattgattttagcaggtgctttttcaattcgttgcatcacattcaccttttacctagcatttaattgtttcattatactcatatctgcttgtaaaaaccaaccttttaacaatgcatccaaaaaagcactgacaatcatctgtcagtgctcttcagtcgacattattgattatcttttaccataatcttatgtctaaattcattcattaaatcaagcatctgcttggcattttccttaccaaacgtctccatccacgaggcaaaccgattatggatcttcggatttaattcttcaactgttttttgaccagacggcgttaaatttaaaatcaaccggcgccgatcatcgggatcaatttcttgtgtaatatagtctaatttaagtaaaacacgaatctgtcgagaaattgcaccgcgtgttacgcctcgttttttagcaatatcaattagactcactgaattatcatcagcaatctctttcataatcagatattgttcaaaagacaattggtaagcttgcgttggttcagaaaccaagtcttcgacatatttaatcgccgacatgtaaagttcaacgtattcatccaacaattgactatctttcacaatatttcccacctttttatttattttcttaactgtaccacaaatctttaagcttgactatttggtgtttgcgttaacttttgttttaactctccgccgaacaaaccggcgaagaacactgcacaaaagatcaccaagacgattaagactaaccaaagttgtgaaccattgccgttgacaacttgttcgaacccactaatcgtgtaagtccctggcaagaagattgccacaccacgatagaagcctgaaagcatgtcattcgggaagagtccccctgtaatgatgagttgtaagaacaataacccgaaggccattaaaattcccatcgttccaaaaagtttatccaatgctaaacatgcaagggtaaagaccgcactcgtcatcatacttaagacgaagaatgcgaacggttgtgcaatcgtcaatccaaaaaggtttgcaaagatatcaattaataaggcttgtgcgacaactacgccagctacaaccaacatccgttgcttaagtccactatgtgctaatgtttcaccatagcgataaagtgttaattgcgtcaacattgccccaacaaagaagacaagtgttaagactaatggcgagaaggtattaattaatgcgccatgatttgtatctgatagtaattgatctttgactggttgcacgaaatgttctacatttgcggaacctgttgaaagattggcaacttgcttgctaccatcgattaacttgacgtttaataagctaatcccagcacccgcttggcctaagccagtcgttaattgtccagcaccatctgccaataagcctgaaccctcgttaatttgtgtaatgccagaaacaagcgttggtgctttttggtttaattcttgtagaccatttgctaattgatggctaccattgttgagctgttggacgccactgccaagttgactttgtagtgtttgcaatccattattcaattgttggccaccatcattgagttgttgcacaccacttgccaaagctggtgtttgcccatttaatgtttgtagaccagcttttaattgttgaccaccattgttaagttgattgttattagcaactaattgattgctccccgtagctgcggttgaaacgccattcagataagttgtcaagcccggcatcaatccaggttgtcctaccttaccttttaatccttcctggatttgaactaatccatcatgaatcatgtcagcggcttgaatcccgcccattgtatcaactgtattgcctttttgtttcaagccagtatcgactttggctaaccccgctgtcagtgtatcaatcgcctgtgtggcaccatttagcgctaatggcgcttgatctttgcttgccatcttcgcaatgccagcttttaattgggccatattatcagcagtcttcgttaattcatcggatactgcttgtaattgaacacccgtatcactcatattattgcccatcgtgcctaagttggcttgaatggcttgcatgttctttcctgaagattctaattggctaccagcattgagtaagtcttttttagctgcaccgccaatcattattactctcaacgcgatagaagggttatcagccaagaatgttttaaatgtcggattgttttcggctagatcgtttaacttctgtaattgtgcaccagcatcttgtaagctgctcgcgacactatctgttttatcggtattgtatactttatcgttaatttgacttaaattagacccactatcttgtaaaagggcacccgtatttttcgtattatccgcaatcttcaataagtctgctttgataatttcggaattatcattattggaatggttaactttttgatctaactcttgaataccagcatttaaagcgcctaacccagccttcaattgtgttaattgttctttattaccatcaagactcgcttcgatttcatcagctgccgcggtcaacttttcgctcaactgcttggtgccatcagttaattggtcgacaccgccattgatttgttgcccaccagctaaaattgtttggttattggctgctaattggtttaaaccagcattaatttgaccagcgctagctgtataatctccaagcccagttgaaagttgcccagcaccagttgttaattgttggaccccactttgaagtggtgctgttttaccagctaattgttgtaagccacctgaaagttgtcctgaaccagtaacaagttgttggacaccagatcccgttttgtcagataattgttgtaagccatctgaaagctgacccgatccagttgttaattgttgcacgccacttgccaatggcgcactaccatctgccaattgttgtgtcccactatgcaacacatttaaattatcatagatttgttggctcccatttgataattgaccggctgctgtgtttaactttttaacgccattgctagcttcttgtacgccactgcctagcgtgccgattgcaccaagcaaggcttgattataagcttcttgaattttttgaacgacactgcccttcatttggttcacgacttgggttgtaatcatgccggccatgtagttatttttcttagacgtttcaacttttaacaagctgactttaggtgacttatctaacgcggttgtcgcatttttagaaaagtctttcggtaagacaacctgcatcgcgtatcggccgctagctaagttcgcttttgcatccttagcactgacaaattgccaatcaacctggtgatcattacgcaacgtttttagtacctgttgcccaactgccaccttttcccctttaaatgttgcggattgatcttgattcacaaccgcgactttcatatgtttaatattagtggtctgttcgtacttaataaaattaaatgtgattagtaatagtaaaatcggaattaagcagatcataataatgaacccacctaacttcactttgttctctttccaattgccaaacatattctttctccctttttgtatacgtcataatcattctatatgatattgttttatcaaacgaatgtcaacaactaatcaaccacgtgaagtatatggcgattcgtcaatctgctttttgaacaaaaaaagcactcaaccagttggttgagtgctactctattcttctattttaaactataggacaattggttcttcatcaaactcaatctcaatcgatttcgttaacaaatcagcatagctgtatgaaacacgttcaaaagcattttcatcctgatctaaatcgactacaaatactgctggaaaggtttctttaagaattccctttcgctttgtaacttttttgcgcccagcttgagcgacaaccattaacttgtctccgatatgcccatcgagaccgttcttaatattggcaagtgtggttggcattatgcttcacctcttcgagggatagtataccatataaacgaaaaatttgcaattataccattgtaccaacgatttggcaattacttacttagcttttttagcaaagattggctgattattcagcgcatcgcttaattgggcaaattgttggatactcaattgttcagcacgagcgctcggtgcaatctcgactgcttctaaggctgttgttaaagctgctttgacttcatcttgtttaccaaattgattttgcaagttattccataatgtctttcggcgttgtgcaaatgcgccacgaaccaattgatcaaataaggtttgattagcaactgttacaagcggtgctttgcgccccactaattcaacaatcgctgaatcaacattcggttgtggcataaaagctgtcttgggcacaataaaggctaagttcacttctgaatgaagttgaacggcaatacttaatgagccgtaagcctttgaaccaggttcagcgttgatccgttctgccacttccttttgcatcattaagaccatgcgatcaattggcaatcctgcttcaagtaagtgcaacatgattggcgtcgtaatgtaatagggtaagttcgcaacgattttgagattatgcttaccattaaattgttcggcgataatcgtttttaaatccgcttcaagaatatcttggtttaaaatcgtgacgttatggtagtgattcaaagtatcttttaagaccggcattaaccgttcatcaatttcaaaacttaatacttgatgcgcttttctggcaatttgttccgttaaagaaccgatcccggggccgatttcaatcacatcgtcatctttggtgatatcaccagcttcaacaatttgtttcaaaatggcgatgttggttaagaagttttggcctaagctctttttaaacttaaagccgtaacgtttgagaattttccgggtacgctcgggatttgcaatatcttccatattaatctcctaattcctgtttaatttgtaatagtgcagcgccaaattcagcttgcgtcacttggaacatcttgagacgcttgtaaagttgtttgctgttggtgtaaccaatgtgcaaaatttcgccgagtaattcgcgccgtcgctttgaatcagcccccgcaatcaagcccgccgttaataaatccgattgactgatttgttcgtctgcttcttcatcttgtgttaatagatgctcaagtgcttggacaatcgccgctggttttgcgtgttcaatgcctaaactgccgcctgctttttctggacgtgcttctgtccgtggtaaaaaggcgtgttcgacgcccggtacattttgagagatgattttacgaatcttctcgccatgaaaatcgggatcggtaaagacaatgaccccgcgtttttcttgagcgagcgcaattttttcgataatttcttcattgattgctgaaccgcgcgtttcgattgtcgaaacatctgggaaaacttcccgtaaccgcttcgtatcgtcgcgcccttcaacaacaatcacttcttgaattgtttttttcatagtgctcctaacttaaaaatccggtgggcattcgcatacgtcgctgccgcaatttcttctggtgccacatctctgagtttagcaatcgcttctaccacataccgtgtgtagcctggttgattctgcttaccacgataaggcgtcggcgttaaataaggtgcgtccgtttcaaccaacatcacgtccaatggacatgctttagctgcttcatggacttcatgcgcatttttaaaactgaccacaccgctgaacgaaatctgcatgccaagatccataaaccgtttcatccattcaacatcgccattaaaactgtggataatccccccacaatcacggacatctgtttcttttagaatcttgtacgtatcttctaacgcgtcccgcgtgtgcactgaaattggtatatgcaaggatttagcaatctcgatttgccgtgcaaaaacggtttgttgcacatcgcgtggcgaagtatcccaatgataatccaaaccaatttcacctagcgccactacttctggtcgttgtaattggtcagtcagcacggtttcttctgccttgtgataacctttggctgattcagggtgccaaccgataatggctgataaaggttcatattgcgctgctaagcgcaaagcgccctcatttaatactgtatctgaaccaacaatcgccatttcaacaacaccgagttcagcggcttgcgcgataaaatcagcttcttgccctgcatatggggtatcattcaaatgcgtatgtgaatcaaaaatttgcatttcaatctccttttagtgtcctcattctgacagttaaaacgtgctcttgccagtagctttctgcgctttgttacactttcaaaccggcgattccatcgccaattcgccaagttagacaaatgctcaaaagctaaccactggcaacacactcttttccattaaaaaggctaaaaggcctacagaatgtaaatgccttttagcccttttgacgtttctgttattttaaattaaccgatttgtgagccgttcaccaagttgtttggcacaactgctaattcaacttgtccgtcatgttctgctgataacaacatcccttggctcaattcgccacgcaatttacgtggtttcaagttcgtgacggctaagactttcttaccgactaacgcttcatagtctggatagaattcagcaatgccggaaacgatttggcgatcaccttgatccccagcatctagacggaatttcaatagtttatcagcgccttcaaccttggcaactgccttaatttcagcaacgcgaatttcggtttgatcgaaatcttcaaacttgatggcgtccttttcactgactaatgttgttgcttttggatcgaattcagctttggcttcagctgcttgttgcttagccttcactttttcgttcactaagcccgctttttgcgcttgacccatttgatccttaatatatgcgacttcttcatccaagtctaaacgtgggaagattggggtccctttagcaaccacttgaatattggctgggaatgtcccataaaccaattcacgttgcgcaacttgatcgaaatcaagccctaattgtgcaaacatatcgcgtggtgcatgcgtcatcacaggttgtaataagagcgcaacaatccgtaaactctcagccaagtgggctaagacactatcgagttccgctttgcggctgtcatcttttgccaagacccatggttctgtttcatcgatgtacttattcgcccggctgattaattgccaaacggtatctaaggcatcagagaacttcaattgatccattaagctggtatattgttcgattgtttctgtagctgtcttttgtaagtctgcatcaaatggtgtcacgtcagcttgatacgctggcactgccccattatcatacttgttaatcattgcaacggtccggttcaataagttgcctaaatcgttggcaagatcgtagttaatccggctgacaaagtcttccggtgtaaatgtcccatcattaccaaatggaatcgcgcgcattaaatagtaacgtaaagcatctagaccataacgttccactaacatttcaggataaactacgttgccttttgatttagacattttaccgtctttcatcaacaaccaaccatgaccaaaaatttgttttggtaatggcaagtctagagccatcaagaagattggccaataaatcgtatggaatcgtacgatttctttcccaactagatgcacatcagcaggccagtatttattaaacaattcgtcgttgtctaaaccgtacccaagcgctgtgatatagtttgataacgcatctaaccacacgtaaaccacgtgcttcggattacttgaaacgtgaattccccagtcaaatgagattcgagaaaccgataagtcttccaaaccaggtttgatgaagttattgatcatttcattacgccgtgacgccggttcgatgaaatctgggtgttcttcataataagccaataagcgatcagcatacttgctcatcttaaacttgtaagtttcttcagcgacccgttgaacttcatgaccagatggggctttcccaccgatcacattgccatcgtcgtctttataaacttctgctaattgtgattcagtgaagtattcttcatcagaaacagaataccaaccttcgtatttaccaagatagatatcgccttgcgctaataacttgtcgaagattttttgaaccgctttgacatggtattcatccgttgtccgaataaatttgtcatttgaaatttcaagagtttgccataatgccttgatgtctttagccatgccatcaacatattcttgtggggctaaatgcttttcagctgctttttgttcgagtttcaagccgtgttcgtccgtccccgtcaagaagaagacatcaaagcccatcaagcgtttataacgcgcgatgacatcggcggcgattgttgtatatgagttaccaatcgttaatttaccagatggataatagattggggtcgttacgtaaaatgttggttttgtctctgccattaggttcgctccttaattaaaaaaacgagaatcttaacaattctcgacttgcttaaataatgccatataagtaatcaaagtatagcacaaaagagcagtcatttaaacgacaactcacactaagccttcattaaaataaatcaatctgttcaggcgctttcggggctaaatcaggaaattctagcccaagtaattgttgtaattgcaaagcattatccgcagcatccccaccagaattattgttaaaaatcacggcaacttgttccgcttgatttttaatctgccgcacagcatccgcaaaaaattgtaattcatcttgatcatagcgatacaatgttcgttgcttccgccattgggcacccggattctgccacccggccatattacgaccatgcaggcgcaacatcgcaaacgccggattggtgacaaccggttcaaacggcacactgttcgtcggtgtttgtgcttcgtctgtgatgacgtgtgtcatgtttagctgcttcaaaaaggcgtacatctgttgcttaaaagcgtcatcgtaccaggattgatgccggaattcgacagcaattggcacatccggtaaccacgcgcgaatttgtcgtaaatattgactattttcctgattcagttgaaaaaatggcggaaactgaaataagaccgcctgtaattggccggccttaattagcggttcaattgattggcgataccgcacaaacaattctttttcagtactcgtaaactcggcgtagtcttcttggcgggtcattgcttggtgtgctttaacaatgaactgaaaactggctggtacttgcgtcaaccagtttgcgctgacggttggtgcgcgtaagccgtaataaaaactatcgacctccaccactggcagaaattgcgcgtagtcgtttaatgttaactgctttttgctgggcattaatgactgatgttctgaccaagtagttaatccaattgttatcatatccacacctctagaaccgttggaattgttgaatgaacaaagcttcttgttccgttaaatccttcaatgtgacaattaattgttgtcccatgcgtttataatttaaccgaatccgcgataggctaaagtcgatgactagcagcagcaacattaagctaatggcgcgcccctcagaaaacgccacccctaaaagctgtaccttgcccgttgcagttaagaatttaaaaataatgtataacgagaacagttcttcgacgactctaaaaaaacgaatcccttgcaacttcttctttaaaaccatcaagaccatcatcgtttggtcctttgtcatcatagtgcttcctctccttctcttggttcagtaatgggaattgcttcaaaaaaaatcatctgatctgcatgaaaatccgtgtcataccgattgagctgaccgcttaaaacagttggtaaaatggcctgtaagtctgccacaattccttgattatcagcagcttgtgcccattctggttcaaataattgaagcacgccttcgcgcattccgaccggataaagtggtagttgcaccgttggtaaaatatcgactaaaaaaatgtcaatcggtgcaatcgtttcaccgtcgatgtgccaatcaatccaccccgcattttggagtgtgtattggttggtttgtaaacccgtttcttcaaataactcccgttgcataccactgattggcgtctcatcgggttctgttttgccaccaatgccattccaaagcccagcaaatgggggcttaatccgattcaataatagtaaagtcccgcgatagcgaattaccgctaaattatagcgtcgtttagtcacagttcaatagcctcacatctcataaattagtttcattttagcatattaagcaaaagagtgctgactgtcgcggttagtaattgagcattaattcaaaaatagggattatggcgcccttcagccatgattgccatttttaggttaaccggaaaaggcagttcgaatcggcacgtttcaatcaaaaaagagcgctccgtctccgtttcgctctttccacattatttttcttctgcttctttcatcgccttcatcaattttacttgatattgtttcgaaattaaaattaacgtttggtataaatcccttacgtaatctgcgagtgctggatctttaaccgcagcaaggcgcgcatccatcaccgctttttcgcgttggatgtccgtcaagccgattttttgttcatgcttgattgttgcaatttgcttggtgacttgcatgcgttcttcaaataaaaccgccaattgggcatcaattgcatcaattttttgatagtgttcagttaacatgggctcactccttagttgctagtgcggcaaaaacgggtgtcgcatccgcttgtatcatagtgactggcatttcaaattgtaatgcctcttgattaatcgctactaattgggcatctggacggcgatattcaattaaacttgcaaatgggtacacacgaaatgacgtcccgaccacgacaattaaatccgccgcttcaatcgcctgaatcgaccgttcaatcaccgtcggatcaatcggttcttcatataaaacgatatttggtcgcaaaatcccaccacaatcttgatgatgcatatcctttaaataggcctgataaggcactgcttggccacacttttggcagctgacacggtataaactaccatgaaattcaatcacatcccgcgcgcctgcttttgtgtgcaacccatcaacattttgggtgataatctgccccttttgattcgcaatcgtcgccatcacttggtgaatgacatttgggtttgcttcaggaaaatacatctgctgcgtgacaaattcataaaaactggctggattggtgattaaattcgtgtgacttaataaatattctggattggcttgctgatgatacaaccccgttttcgatcgataatctggaatgccagaagccgttgacacgcccgcacccgtcaagaaaacaacatgctgtgccgcatgcaacattgatttaaaagtcatcaccatcactcctttttaacgtgcttttaattcgcagctttctgcgctttgctacatcagtcggccaatcgcctttggcgcttatccgtctgattaggcaagtgctcaaaagctaaccgcgaattaacgcactctgttctttaacgtgcttttcaagctaactttctgtgcttagcactgtgaatcaaatcatcgactgcgtcgctaattcgcttccctgtgctaatgctcaaaagttgaccagcttgaacgcactcattttcttaatgaatacggcattccaatttcatctaagaaggtttgcactgataaatcatacaatcgtttgaaatattccggtgttgccttgtcttctggaatccctaagacaaaagcattttgttgatcactcttaccaattccaacatacgctttttggttcgttgcggtcgcaaatagattttcggaatgtaaaatatcgtagacttggcgcacttctaatcgtagttgccgttcacttaataccggcgtcaatgtcaagagttgttggaggttcgtttcagcaaatcctagggttgataacacgcgatcaaacgcaacccacaagttaatcacagcccgccgtaatgtgaatggtgaatcaattgttttgcgtgccaacacatgatagagaatttcggcttgggcaaacgcaatcggataatcagccgtccactgttttaacagttgttggttgccaccatcaaagaagacgagggcatctaacagcgttaatacgcggaaaatcacccatctattttcgggatcgtctttttccggggtcagattatctcgtagaccttcaaggtaggcttgtttagtttcaacatccacaaagccatgggattcttgttctttttgaatcaccatgtgcacagcggcattgtacaaagttgtgccggtcgcaaccaattgttcatcgagttgcgcatcctgcgtggtgacatcggtcatgatttgtggaaaaccgattgataataatagtaagtgcaataattcgtgtgataaagcataatcggccgctgtcgcatcggtaattaagattgccaagctgccatcgttatttaaaacgcgttgtgcctgatcatgttttaacatcccagacgctgcatctgcgacccggatcttaatgggttgaggataattcttttgaacctggtcaattaaactttggatttctggggaaaattcagtagttgtcatttttggtctcctttgagtaaacagctttgcttttcatgataagccaaatccagttaaattaccaacggtttagaatgtatgaaagcggttaaaactgttataataaaggtaatcttaatttaaaggacgtgttgactatgacagaaccaaattcgcgaaaagtaattttataccttgctcagagtctagatggcttcatcgctgaaaaagatggtagtactgcttggttagctgcactcgattcatccgaatcagacgctgcaattcaagctttccaacgcaccgtcgataccgttgtgatggggcgtaagacatatgaacaaagtcttaaattagccggcacctatccttaccaagataaaaacggctatgtcttctcgaaaacgttacatgatacagaagatcgaacacatgtcgttgctgggaatattcctgagttcatgcgtcaattaaaaaaagaagatggcggcaatatctggcttgtgggtggtgcagaaatctttaccgaattgcttaaagcccagttagtcgatgaactcatcatcaccattgcgccagttctcctgggtgacggcatttcactggtcagcacgcacttaaccgatatgccattggaacttatcaatagccgtcaaatcggtcattttgttgaattgacatacaagattaattattaaaaatcaaacgaaaaggcagccacaatattttgtcgctgccttttcagattaaagtacgggggaatgaccaatgaaagccaaccttaaaatcccacttattttattcatcgctttatgtatcagcggcctctgccagctgttgcaccaagatttcttcgctgtgcttgtgatgctcatcgcaacaatcagttgtctgataattgcctttaaaaaccggcaagctagcggacgttaattcgcaacgcgctcataatcacgagcgtctgttctgtgctgatggtcgccccacgtaataattcgagcgtgaaagtcgctttttcgaattgattctgactgatatcgagattcttcaaattcgtgccagtcatatccatgccgttcaaacgattcccgatcattgttagccactgccaatcaacttgcccgagtgagacttcttgcatactgcaatctttaaagtcgacatgccgcatccgcgcaaagttaaagccggtgtaatccgcttggcaagtgtcgaacgtgacatcattcagaccagcctctgcaaaatcggaaccaatcaactggcaaccattaaacgcgactcgttggaagggatcattcgtcaacgaacagtttaacaacgcgcagtgttcgaattgcacatcttgaaaatcacagttattaaagtcgacttgttcaaactgacaatttttaaataaacagcctttaaagaataacatctcaacttcggtttgcttcaacgttagttcttcgaaaaacaaaccttcataagtctcatctggttcaaacgcagtaagctgtaccgtctcaagttgtggatttagccgcggtgcctgtgctttcttatctgtcatctaactgtctcctgtctattgtgattagtataccgaaaattgtcgccagtgacgacctgaaattcaggaaagccttttcttttcattaatggtactttgtggtaggttaaaagcatcaaataaaaggagtgattgatagtgcaaaaaatcaatgttggtggcagcggcttaatggcttcgccaattgtctggggtgtcatgcgcatcccacaactgagcgaccaagaagccctgacaatgctcgaaaccgcctatgaacatggaattaattactttgataacgctgatatttacggcgatggtgcttccgaaattaaattcgggaacgcccttaaggccagtcatattgaccgtgatcaagtgctcgttcaaaccaaagtcggcattggcaaaaaaatgtacgacttttcaaaggaacacatcatcgaaggtgttgaagccagcctcaaccgattacaacttgatcatgttgacaccttactgctccaccgacctgatccactcatggaaccggatgaaatcgctgaagccttcttaaaattgcaaaatagtggtaaagtccgccaattcggggtcagcaacttcaatcccggtcaagtcgacttactccaacaagcagtgccgcaagcattgattgctaatcaactccaattcagtttgatgcacactggtatgattgatgccggcgtgcataccaatatgcaagacgcgcgcagcattcatcacgatggtggtttattagaatactcacgcctcacgaatatgaccattcaagcatggagtccttatcaatacggcatgtttgaaggggtcttcatcgataatccgaaatttccagaattaaacgcagcactccaatcagttgccaaggcacatgacaccaacgtcaacgcaattgctagcgcatggctcctcagaattccagccagcatgcaagtcgttgtcggcacaatgaaccccggccgcctagcacaaatctgcgaagcagacaaagtcaccctcaccagaagagaatggtacgacctatacttggcagcaggcaatgacctgccataaagtgctgagatagccgtttatcacttgaagattagcctatcaccaggaattatggtggtttccggccatgatttttgttgtgtagtgaaccggaaggttatggctatcgaagcatgtttaaagtacgtttaaaacggttagtttctaagtaagtagtaattgtgcattaagcaaaaaaagcgccgtctcaattaatcttgagacggcgctttttttggttctacttaattctgataaggattgcctgcatactgatccaccaccgccatcgatccatcgtaatggccgcgaccggttgcatagtcaaattgcatcttaggttgtacattccaaacatacgcattaaagttcaacttcttatctgttgagattgcttgaacccagtaaccgcggggcatcaattcatctccacggaacacagttgtcacttggtaaatcacctttttattttgcgttagtgcttggcgaacctggtcttcaaaaatctgcatggtacgttgattgctgaagaccgtttgtgtcgctaagttcttcggattattgctactgccgagttcccctttttggaaaacaccatctcggttgaaattaaacgaaatcgcgtatgcaatcaaatggccgcgactttcaggaaagacccgttggccatcaatcatcacgggttgattatgccagccggttggttgccacgtttgacgatggcgtgtgtttgaacggcctaacgtctctttcgataagaaagccgtattagtcgttgtccgatttaaaccatccaacgcaccatacttgatccgttcggtttgccattgacggacatccaacgttgatttattatggttcacttctaaataggcattgtcgcctgacttaaaggtcttctcagccaagattgccgttgtttttttaacttgttttttatttgcaattgttggtgcattctcgtgcgttggttgactagattgtgtcgcctgacagccacccaacgccaacatggtcaacgataagccgaccaataaatactttttaaacatcctgttcctccctattcttacctgcttcacgacgcttcagttggtgcattgtcttgaaataggaactcaatagcaccaaacatgaaccaatccaagcgagtgggttggctaaacttgcgcccatgaagccgaattgctgcacgaggaagatcccggcaaaaatccgcatgaacaactccgcaatccccgctaaggttggaataaagctctgccccaaaccttgcaaggtgtagcgaatggcaaataagattgccaaaataaagtaacaactactgttaaagcggaagtagatttgtgctaaatccgtcacgtgcggttgattgttcccgataaacaggttaaccagtggtcgtccaaaggcaatgatcaacgcgcccatcactaaactaaagatgattgacaccattagtgtctggcggacccctttactgattcgtccaaattcacgtgcaccgtaattttgtgcggaatatgtcgccaaggtaatcccaaatgaattcccaacttgagttgctaattgatcaatcttcccagccgctgtgtaagcagcaaccgcgctagcacccaatgtattcaacatgatttggatcacgattgagccaattgcaataattgacgattgaaagcccatcggtaatccaaccttgagatgatccatgacatctttgcgcgtcacgcgaaaatccttcggccgtaaaacgaggaccggaatgcggcgataaatatatagtaagcataacacagccgcaattatttgtgcagagaccgtcgcaaacccggccccttcaacgcccatatgaaagcctaaaataaaaataaaatctaacacaatattcacaatgaccccaattactaagaaaaagaggggggttcgactatccccaagtgcgcgaatgatattcgaaagtaagttaaacgccatcgaggcaaaaatcccaccaaagataatcataataaaccgttgagcatcaacaatgatgctggccggcgtcttcatcatgaccaaaatatgtcgagcaaataatagactaataactgtcaaaatgatggttatcaccaaactaatcagaatgctcgtcgcaaagctgcgcttaacgccgcgatagtcttgagcaccatagcgttgggctgtcaagatggacaacccagccgtggtccctgtacaaaaaccgataatcagcatgttcaatccacccgttgagccaactgctgctaacgcattaacaccaattgtccgcccaacgattaaggtatcgatgacactatagagttgctgaaaaatattcccaatcaataatgggccggtaaataagataattaatttcaacggattacctttagttaaatcatgcatatcaattctcctttgctccatgttgataacttctcaaattacacaccaaaaacagcgtttacatctgtcttaaattgaattaagtctctcatattcaactttaaagtaccatcaaaaagcatctattatcccactatattagtctataaaaaaacagttaaacaagtcattcagcgacttgtttaactgtttttttaatttgaataggattagttaaagtaattaatccccattgcatcccgcacttctttaagggtttgttctgcaacagcattggccttcttgctaccttcttctaacatcttataaacggcttctggattcttttcaaattcagcacgacgttcacgaatgggtgcgaacttcgcttgtaagacttcgttcaagtaacgtttgatcttcacatcacccaaaccaccagcttgatattgcgctttgagttcagccactttttcacgatcatcatcgaaggcatctaaataggtaaagactgtgttgccttcaatgtgaccaggatcggttactttgatatgcaatggatcagtgtacattgacatcactttcttttcaagcgtttgggcatcgtctgataggtaaatcgcattgcctaatgacttactcatcttggcgttcccatctaaaccaggtaggcgtccttcgccttttggtgggaagaccccttctggttcaactaaaatttcttgtccgtaaacgttgttaaacgtccgtacgatttcacgggtttgttccaacattggttcttgatcatcaccaacaggaaccgtcgttgctttgaacgccgtgatatcagcagcttggctgactggataaattaaaaagcccgctggaatactttgttcaaaattcttttgttggatttcagctttcactgtggggttccgttgtaaacgcgaaaccgtcacaaggttcaaataatgcatcgttaattcgctcaaagcaggaatttgtgattgcacgaagacggttgttttagcgggatcaatcccaactgataaataatccaaagccacttgaaaaagactgttccggattttttcaggatcacgcgcattatcggttaaagcttgttgatcggcaatcatgataaatgtttcgtattcgcctgaatcttgcatcgctacccggttgcgtaatgaaccaatgtaatgcccaatgtgtaatttaccggttggtcgatcgccggttaagataatttttttgttcataataataccctccaatttaatttatcaactcaaaaaaagcgccctaattgtgattaaacaattaggacgcttctacgtggtaccacctaaattgcacgaaaatcatccgtgccactcacgcgataagggtgctacccgaattagttactcactaattcccgattgaaggcccaattcacaaccaacttcttgacgacttctcagtcccgccgcttcctgttcaagaaaatatcagttgctacttatccttcactttgtctgttgaattactgtcatactaacggattttaaaatgaatgtcaatcggtcgcttttttaccccaagacgcttataatataacaactaacaattggaggctgctatgttacacgaagacacaaaacaacaagaacaagcgcgcgttgaccgcacagttatacaggtcgaccaacgcctcacagtgattaaccaacaattggccaacgcctacaatgaaaccaaagacatcgaacaacgttacggcgacaatacgaaagtcaacattaccgaagtcgatgaccgcatggaaaccaacgccgcggtccaacaacaaaagcaattggtcgccgccgctgtcgaaaacgaaaaattactgactagccaacaagaacgcctgaccgatctcgtcaactccccttacttcggtcggattgacatcaccgaagatggtgaaacggaatcactctacatcgggaccgccacttttatcgacgaccaagacaatttcttaatctacgactggcgcgcccctgtttcgagtatctactataatgggacactcggtccagtgacttatgagacgccaaatggccctgtcaaagttgacctcaaactcaaacgccaattcaagattcaaaacggtcaaatcgaacacgtctttgatacgaacgaaactgtcggcgatgaactcttacaagccgtcctcggtgaacaaagtgacgaatacatgcaaaacatcgttgccacgattcaaaaagaacaaaatgatatcattcgcgatacaaccgctgacttactgattgtccaaggagtcgccggtagtggtaaaacctcagctgtcttgcaacgcatcgcctttttactctatcacagccgcagtcagctcgaagccgaccaaatggtgctcttctcacccaaccgtttattcagccattatatttcagaagtcctgcctagtttaggcgagaaaaacatgcgccaagtgacgatggccgagttcttaagtcatcgcttctcaggcttacaggttgagaacctcttcgaccgcttcgaaaaagatcaagccagttttcctgaaatgacacaagccatgcgccggtataaagaaagcacagcgttcatgcacgcaattgaagcttacgttaaacaagcctcaacccaaccgttggcattcaacgatctatacttcgaagaccgcccattttttactaaagaccagatgaatcagatttatctcgcgctccccgcaaatatgttacccggcgacaaattcctcgccactaaaaacacgctcatcaaacggcttaaacgccaaatcaacctcgaagttcatctcgactgggtcgctgaaaaaatcgataccttaaccgatgatgcttaccggacgattgtcggtgaccgcgaattcgattctggcgatgatgaacaagctttcatcgctcgtgaaatcgttcaaagttatttcgccccactctatgaatcaatctacaatgattatttcctagatgaatccacagaatatcaacacttcttaagtggtgcttgccctgccgacatccctacgaaggtttgggacgccatgattcgccaagtcgcggataacaatgaacgccacatcgtcgggctcagtgacgccgccccaattctatacctgcgcgacttattaactgacagcggccaaaatcacggcattcagtacctcttcatcgatgaaatgcaggattacagcatcgctcagttcgtctacatccaccacgcctttcccaacgcgaaattaaccgtgctcggcgattacgcacaggatgtcttcacggcgacctaccaaaccggccacttcatcgatcaactgaccgctgcttttccccgcttaaaaatcaaccaaattagcttaaccaagagttaccgcgcgaccgccccaatcaccaacttcgccaaggcactcttgccaaaagaaacagccctccaagccttcagccgtgacgggcgcctaccgcgcgtcattgagacgccaaacgaccaagcgctcgctacactgacccaagaaatccgccatctccaggcagaacacgcgaccgttgcgatcctcaccaagaaccaacaagttgcccaccaactctacgctagtttaacacctgatgaacacgtcacactcatcggtgaaacaacccgtagtttacccaaaggcatcctaatccttccattatacttagccaaagggctcgagttcgacgctgtgattggctacgacatctctaagaagaccttcggcgcacaatcagacgtagatctcctctacacactcgtcacacgtgctatgcacgatttaacactgattggcgtggatcagctcagtccgttgatagtggcactgccgacggacatctatactaccttacaatcaactaagcaatccatttaagcaaaaaagcctgtcgaaattatcgacaggctttttgaattcgtattttatgcaccgtatggaaaatccaaaccagggactgcatttaaacttagatcagcaaattgttgtttttgtaattcgatatgcgctgcggccccgatcatggcgccgttatcgccgcataatcgaagtggtggcatgatgaggtctaaatccattccggatgccttaatggctgtcgccaaaccttcacgtaaaccttgattggcagccaccccaccggccacaacgagttggcgcacgtttaattgacgcgcggcgtgcatcgttttagtggtgagcacttcgaccacactcgcttggaaactagcggctaagtcttcgtggttcagcgtctcaccgatttgatcggcatggtgcactgtgttaatgaaggcactcttcaaaccactaaagctgaagtcaagattatcttccttgagcatcgcacgcgggaatttaaatgtatcttgacctaagtgggcaagccgatcgatttctttaccagctgggtattgaatcccgaggacgcgaccaattttatcgtaggcttcacctgctgcgtcatcccgtgtatcaccgataatttcgaattcgccggcggctggcatgtacaccaattcagtatggccacctgaaaccagtaaagctaacaatgggtattctaaaggcttaacaaaccgcgccgcataaatatgccccgccatatgattgactggaatcaatggtaagtggtgtgcgtaagcaatcgctttggcagctgtcacgccaattaataaggcgccgactaatccaggcccataagtgactgcgaccgccgttaaatcagcgtaagtaaccccggcctcttctaaagccgcttgtgtacaaactgtgatttgttcaacgtgatggcgactggccacttcgggtaccaccccaccaaaacgttgatgactcttaatttgggtagcaatgatgttgcttaaaataacatgaccgtcttcgatgacggccacactcgtttcatcacaactggattcaaatgctaaaattaattctcgtttttccgacatgactgactcctattgactcaatatccgacacatactgaatgcatcttctttttcctgaatgtaataattgggacgcgtccgcaccactgtaaaacccaatcgctgataaacggcttgagcgcttgtgttgctggcgcgtacttctagtgtaattttttgactgggataatcgtgggctaaactaaccatttcgtgcaccaaaaagtggccaataccacgtttttgataacttggccgcaccgcgatattcgtaatatgagcttcattggttgaaaaccatgcaccgacaaacgctacgacttcagtcccttggcataaaaccagatacaacgatgtcttgcgcttgctcaactcactagtgaaggtccaacgatcccacggcgtctgaccggcatagaccgaccgttcaatgtccaacaatgccgtaatatcattttgactcgcgcgtgctaagtaaaatgtcgtctcatcaatttcaacgcgccgagttgtgtaaggcatttctttcttgacccaaatctggggtttgaggtattccctaaacttgttccacatacgaatcagcgcctcgctcatcatgcgtttttgcccagttaacttctgcttccgtcttgcgtaaataaacgggtccgaagccatggatatccgcgacaggttcagccatcaagcctaattcacccaagacgctggcgtgcggtaaattatggttggcggacacgaaatgcgcgttactacctaatgcagcttgaatctgttcgttaaagtgtgcaacgtcattccccacaaaataaacaggttctgccaataattgtaattgtgccagtagtgcttctagtgaaacgtgttgatcggccacaacggtttgcaatgtcccattttgccactgataaatccccgcgaaaacattgtcgcggcgtgcatcaaacagcggtacaatcaaggcggtcgtatccatcacattggccgctagcaatgctaaactcgaaatcccgaccaatgacttattaagcgtccaagcaaaagacttagccgttgtcaccgcaatccgcaatcccgtgtatgaacccggaccttctgcaacgacaaagcgatcgatatcttcaatggtggtttttgtttgttttaatagttgatcaatcattggaagtaacgtctgactatgtgtttgacgaatattaacagtcatttcgcctaaaatttgatgatcttcaaggagtgccacactcaccgcttgattcgaggtatccattgccaatagcttcattatttcatccttcttctgcttataatccttgttattctagcataaaaagccggtttccacaaaaaaaggcgttatcttcaaatagataacacctactcatttataatactctatcttttaatctaataatcggttcgaaatgcatcacgatgtatagaataatcggatgaatcactaatgtggcagcttccccaatggcccgcgccgtaaagtggaacccaaatggtgtatgactaataatcgacacccaccatgaattcaaaccgaggttaacgattagcacaactgtcacaacggcggcaatcacgcgccaccatgtaatcttttgtcggtagaagtaacacccatagatgaaagcccctagaaacgctgaaagtgtgaagcctgggaaataaccacctgggaccccaatcatcaaactattgatgaggtcgccaataacggcggcaagtcccgcccaaactgggccaaaccaccaccccattaaggcggtgacgatgaatccaaaactaattctgaaaatcgttagtgaaattgcaaagcgtgcaaccaccaattgtaaagcaattaaaacagctagtaaaacaacgcgtctagtgtctagcttaacaccaaaaatctgaccattaaccataaaaagcatctcccttttggagctgccacaaataatactgcggcgaatgcggtactgaaatcgcaagcattgctgcttttcgtctggtgtccacattccgttccaccagcacttaacgcttcagtcctactccgaatttttagaaccccttaaatgtatcactaacgttatttaattacaagcaattgattttcatttttcagcaactcttgcagaaaatttgctatacttacagatgagtaattcggatttaaagaaaggtgttcattaaacatgaagaaaattttagtcctccatactggtggcacaatcgcaatgtctgcggacgaagatggcgcggttgcacccacagatcaaaatccaatggccggctttgaaaagctgttcgataatcaattaatcattgaaagtgaagagttcgccaatcttccttcaccacacatcacacccgctgtgatgttaaaccttaagaatcgaattcaacaagctgaagaagacgggattgatggtgttgttgtcacacacgggacggataccctcgaagagaccgcctatttcttagacttgacacttcccaacaatatccccgtcgtcgtgactggtgcgatgcgctcgtcgaatgaaatcggcgcagacggattacacaacttgattagtgccgtttggacagccgcttctgacgatgctcatgataaaggtgtgctagtcgtgatgaacgatgagattcacacagcacggtatgtcacgaagacgcacacgacgaacgtcgcaacctttagaacgccaacttttggtcccatcggtttggtcagcaaacacaatgcgaatttcttccaagaattaattcgttctgaaatttgcgacatcaaaacccttgtcgaacctgtttatcttttaaaagcatacgctggcatggatgggactttattcgacgccatcaaccaacccaacaccaaagggctcgttatcgaagcactcggggctggtaacttaccaccagcaaccttacccgctgttcaagcgctattagatcgcaacatccccatcgtacttgtttctcgctgtttcaacgggattgccgaagacgtctacgattaccaaggcggcggtgtaaagcttaaacaaatgggcgtcaccttctgccaaggcctcaatggaccaaaagcacgcctcaaactacaagtcggcctcagcgcaggcaaaacaggcgcagcattaaaagaatttgtcagcaacgcaacatcatagagtgcgtcatcaacggttagcttctgagcacttgcctaacttagcgaattgacgctgtaagcgccgatttgataagtgtagcaaagcgcaggaagctgttgatgaaaacacgttttcgatagagtgcgtttgaaacggttagcttctgagcattaactggatttgccgaattggcgatgaaatcgccgatttggtaaattgggttaagcgcagggagctgtttcaaaaagcacgtttcaataaatattcgaagataacaaaagaaagcccatcacaactttatctgtgaatggggctttctttcgtttaaacgtgcttcctcgaactgccttttccggttaactgaataattgggattatggctaagacccgccataatcccaattatcccgttaatcctcaaagccaacccgttcgactcagcgctctttccacgtaatttccgcttctgctgcacttaggtcatccacggcgactttatgccgtgttgtgattatatcatcaactgtgagttgttcgaccatgctttgggtcatttgaccgtattgaatttcgtggccgtagcggatgttgacacttgctacgcggtgtgtcgtcaagaagtcataatcgagcgcatccaacatccattcaaaataatggacgttattaacgtgttgattaccatcaatatcgaaataacgcacacgatattctttggtcgtcacttgttcgggatcaatcttcttaatccgtgggaatcgtttgctacctttaatctcacttgactcgaatggtgccatgatttccggcacaacttgcaccatactccgtgtttcatacgacatcatcacgaagatgctttggacgaagacgcattcgttgccggcttcatcatataaccagaaattccggtaacagaaatacttgttgtaactctcagcttcagtcacaattttaactttttcatccaccttcggcatccgcgtaatcttcatttgatactgcgtgaccacccaaccaagattgagcgcatgcattgtcgcttcaccgacgttgagcgcattaagttgatgctctgatgctaaaattaaaatgttcaccaaggatgcaagcgttaattcgcccttgatatccgtttcgaaatacggaatttgatagttttctgaatattgctttcctggcatggcgtgacctctattctgttaattcgtggtaggcattataaacgacttgctttttcaagccatttgccttagcgaccgtcttaatcgccacgttggggcttgctccttgttgaatctgggcttccacttgttcaggaagggatagcgattccgttgcaactgcactgaccgttgcatctggtgctggatttccagcaactatcatcacaaattcaccacgtaattctgtttcagtcgcccaagcaagcacttcttctaggtcgccacgaatgaattcttcgaacttcttcgtgagttcgcgccccaaggtgactttacgatcggcgccaaacgtactaagcaaagcttgcaacgtctttttcaaacgatgcggtgcttcatagaagataagtgcttcaggcttttgtgccaacgtcgttacggcttccgttaactccttgcctttacgaggcaaaaaaccgtagaacgtaaacggttgtggtgtgatgcccgaagcaatcaacgctgtaatcccggcattggctccaggtaatggcaccactgaaatgcccgcttcaatacaagctttaacgagctcatgaccgggatcactaatcgatggcatccccgcatcactaacttgtgcaatatcgtcaccggcttctaatttttcaatcagcgtttcaatccgttgttgcgtattgtgttcgtggaaactaatttgtttcgtttcaatctcaaagtggttcaataacttctgcgtatttcgtgtatcttcagcagcaatcagtgcgaccgatttcaatgtatcgattgcccggtaagtcatatcgcctaagttcccgatgggggttggtactaaaaataaagttcccgtttccgtcgttttaaaacttgattgtgtttgcatgttctatcctttcaagatgcatcaataatgacataaagacaggccaaaagtaagcatcccttttgccctgccttttttaatcgtttgttcgttcgccgtagatgacatcattacaaaatgcgcaaggctcgttattttcgcgtcgtgacccataaaaatacgggcagatatggaagccttcttcgtaaagattctgtaagttttgttttgatttcgaaagggcttgagccccttccttacccgtttgcggggtggctgatggttccaattcttgcaaatgttcccgcaagtgcttgttttcaatctttaattcagcgtttttctcaaggacttcggcaaggactgctttcatttcactgagcccctcaaacgtcaatttagcttgctgttcaatgtctgataactgttcatataagtctttactcaccgttgatatcctcccgatacgctggttatgcgttttactatgcaattaactttaacgttaaactctctaagacgttttggcaactaatattttgttcaaaaatgcgttgtgcttgtaaagcatattccgtctgagcgaccaactgcgtggtagtcaacgcggcgctggcctggtttaactggctttcgtacgcaccaaaacaaggtgtggcgcctaattcatagcggtaattcaataaatcttgataccataagcccaccaaagttaaaaaggtcttctgctgttggcgatcaactaataatggtaaaatttgcgtctgaatctgcacaaatgcttctaaatcacgttgttcaactttttgtgcccacgcggcaagcttcgcactgacttgtaatagccaatcatccgccaataaggtctgtgcttcagttaagtcacttgtcaaatacaccaataactgcgcttgttgtggcaaaataccagctgcttcaaactgttgttgcaccatttgtggtgccaatgctgccagatcaatcacttgaagccgtgataaaatcgtggggagcatttgatttttattactcgtacataaaatcgcgtaaacattttgcgccggttcttccaagaacttcaacaaactattagccgcgctggcggttaacgtttcagcagcttcaataatgaataagcgttgactggattccatcccgctcttagccacttcttgtttcaaatagcgaatatcggcaatcttaatactcttaccttccggcttaatttcaatgacatccggatgattatgcgtcaaaatccgctgacattccggacatgtccgacaaggttgcccatctggtgtcacttgttgacagaacagacgcagtgccaaccactgtgccaattgtgtcttccccaatccctgtgcaccagctaatagataaccatgcgccatctgtccacgcgcgataatctgggcaaactgggccacaagtttgggttgaagctgttcaattgttaaactggccatcgattagaagcggtggaactgttcaatcggcatcacaaagacggttgccccaccgacttgcacttcaatcggatatgacattgagctatccatcgtggcatccatattaacaggcggtgtcatgaattgttcgcgtgcctgacacgttttttcaataatcttaagcgcttcaggaacccgttcgtcttcaattccgacgataaacgttgtattcccagattttaagaagccaccagtcgttgacaacttggttgcccgaatgttggcatcgattaattcgctgcttaataagttgctatctttatcttgaacaattgctaaaagtaatttcatttcaatctccccttttctatgctgtgaataagtctggatatcgttgttcaatcacttgcagacatttggcaacaactatgtctaagtctgcggtcgcatcaatcgtttgaatccgctctggattatcttgcgcaagttgtaagtaggattgccgaactttttggtgaaaagccaacttctcttggtccaatcgatcatattgatcctgtcgattctgtttaatccgttgtaaaccgacttcagatggtacatcaaggtataacgttaaatcgggcgctaatccattagtggcaaataagttcatttgcgcaacggcttcctcaccgatgccacgacctgccccttgataagcgattgaactatccacaaatcgatcacaaatcacgattttgttatcagccaacgctggttcaatcttttcaacaatgtgttgtcgccgagcggcagcgtataacagtgcttcggtgcggtcatccattgccgtattttcaacatctaaaatgacattgcgaatcttttcggcaatcggattgccacctggttcgcgcgtaacaatgatgtcttggttgcacttggattcaagtagcggtacaacagccatcaacgcacttgtcttaccagcaccatccggcccttcaaacgtaattaattttcctaccacaaaacaaccttcttcatccatagagttacttccattttacttgattcaacaaaagacgtaaagggaagagtgcgtatccggcggttatgttcttgcgtttagcgtgcgacagcagacgtttgaaacaaaaaaagacaaagtcactcgaccttgtcttcacgctgcggctgtcatctgaatgcccgcgctatctaaatgtatttctagttgctgcttctttcgaaactgcttcacctgctactttacgttggcgggcttggcggaataagaattcaaactttgcttgttgaatcttactttccatctctaattggtcatcgagtccgcggacgttgtcttgcgtcttttgggccatctgccacttatctttgacttggtacactaaatccaataaggcttgatcacctaattgttttaatgtcggtttttttctaccaaacatcgcaaacccaccattcttaaatttcttgacgcccttcaaccgcttttaacaacgtcatttcatctgcgtattcaatatcgctaccgactgataaaccgtgcgccaaacgcgtcactttaatcccagctggtttaatcaaccgcgaaatatacattgccgttgcttccccttccggtgttgcattagtagcaatgataacttctttagccggtgttttttgcaatcgtttaatcaagttggcgatgttaatatcatcgggtcccttgccttcaatcggtgataacaccccatgcaagacatggtagagcccatgataatcattcatccgttccatcgacatgacatctttcggttgttcaaccactaagatcatgtcttgactccgcgttgtatcgcgacaaatttcgcacgggtcttcatccgtaatgttgccacagacactacaataatgcagatcacgacgtgccgaaattaagttcttggcgaaattcgtcacatcgtcttcattcatatcaatcgtgtaaaaagctaatcgggttgcggtcttgttcccaatcccaggtaacttcatgtagctttcgatcagcttcgcaattggttctggatattgcatcaatgcacttccttaatgtctcacttaaaatgggaggcctttagtaaatttacccatttgggcttgtgtttgtttatcgatttcagtcatcgcttcgttagttgccatgataatgaggtcttgtaacatatcaacatcatctggatcgatggcctctggtttaatggcaatgtctttcatcttcttgtcgccagtcattgtgaccacgactaaatcgttggctgctttgccgacaaattctgtattgttgagggcttcttgtgtttgccccatttctttttgcatcttttgcatttgtttcatcataccttgcatattacccattccgcgcatcttcattacttcctttcaaatttaaacgttaatcttttttaacaaccaccgcatcgccaaacaaagcttgtgcttgttcgacaacggccggtttttcttctggtttcggcgttgcttctgcttcgtcatcagttgttacctgttgacttggtactgcgtgattctgtaaatattcctggcgaatttctggccaaacatcgtggggcactaaaaccaccttgaaggggttgccagtcaaacgattcaagccgttttctaaaatgttcaaaagatcttgatcattgctagctcgctcgaataaaatcgcgtagttaaacgcgacgacaacgccactttgactcgccgcaaccggttcggaaaccttcatcacggcgcgcttggtaacgtccaacatattcaacagatccggccagacttctttgagattctccaaattggtccgcgtcgcatctgccaataccggataaatcgccttacggttgacctttttactaatcttcttagcaggtttggcctttggcttggcagctggtgcactcactggtcccgccgcttccaatttttgtaacgccgcttgtaattgtgcaacttgttgactcaacgctgcgacttgttcattatcagcagctggtgcggcaaccatcgtagtcgttacttgggctgtctggacttgcgtcaagcggaccgttgcgacttccagatagatttctggatggttcgtgaaacgcaattgctgttgcgtttcattcaggatatcaatcaccccgtacaaacggtcagccggcatcgctgcactgagcgctttgaagtgttcatccaatagatccatttcacttgcggcgactaattcgggtgcttgttgatacaacagtaagtcgcgcacatattcaattaagtcttccacaaaacgttgggcatctttaccttcagccaaaatctgttgcaacaattgcaacgcttgtttaggcgcattatcctgaattgtttggacataatccgccaacaacgcttcggttaagctgcctgtcacatccaacgcattatccaacgtgacgtgattgtcgctaaaggataacacttgatcgagaatacttaaagcatcccgcatcccaccttcagcagctttggcaatcactttcagagctgctggatcataggtcatttccttttgatctaaaatataagccattcgcttaaataaatcagcggccgtgatccgcttaaaattaaagcgttgcgtccgcgaaatgatggttgctggcaccttgtgaacttccgttgttgcgaggatgaataccacatttgttggtggttcttccaacgtcttcaacagtgcattgaacgcaccagtggataacatgtggacttcatcaatgatgtaaattttataatcagcttgggtcggcgcatatttggccttatcccgaatatcacgaatctcttcgaccccattattagacgccgcatcaatttcaatcacatcattgagggcgccagccgtaatggcccgacatgtctcacattcattacatggttcgccatctttttgataatgacagttaattgccttggcaaaaatcttggcagccgatgttttccctgttccacgtgggcctgtaaataaataagcatgacttgtttggtgcgtcataatggcatttttcaatgtttgggtcattgtttcttgcccaatcacgtcatcgaaacgctgcgggcgccaaacccggtataaagcttgatagctcatttaatgacctccacctttgcaatttaaagtccgattcatttaaaactacttgttccattttagcatattttaccgtcaattttgattgcgttgcatgaaaaaagacccaaccgacaaaattaattgtccgttgggtctggttaattttcacaaaacttaagacacatgataaaacaaacttagtgctgctttcttccgaacctgacacgattcgtaggctcatcattgtctcaaggcctttcggcaattcctattctacctgattcaagcattaattaccagccattttcttttttttacggcgattttcgcgaatctttctaaaaaaagtctgcaataaactcgcacattcagcttctcgcaccccgccaaccacttcagcttggtgattgaaccgtttgtcagttaataaattcatcaacgtgccggtcacaccagccttaggatcactcgcgccaaaataaactttgggaatccggctattgataatcgcgcctgcacacattgggcatggttctaacgtgacataaatcgcggtatcttccagacgccaactcttttcaaccatacaggcttcttgaatcgcgagaatttcagcatgtaacgtcgcatcttgcgcgtgttcgcgaatgttatgcccccgtccaataatttgtccgtctttaacaatcacggcgccaatcggtacctcgccaatgatgcgtgcttggttagcttcatcgatggcggcttgcatccattgatcgatctcttgttgtgtttcactcacgcgttagtcgcccctttattttacttctcaactattaaaacacagtcgcgctagtcgagcaattaaaaatggtgccgacggattgtcgataccatttttaattgctccataagccatcctcttccgtttaactgcaaaatgagcattatggcaaggactgccataatgctcatttcactgttaatgctcaaagcctgaccaactcgagtcgcactctatagtttttctttcacctttgttgcgtaagccattagtgtttggcgcaaatcatccatcatatctggtagattgtctgcgtgttctccgagcttatcttttaattgggttaacctgtctgccgcagtcaacaagttattcacatccgcatcggagagttgatcgaccaactctaacgccttttgattaccatgtaatttgtcttttacaaaacttttaactgctaatcgtttgcgatagcgcgatactttatcgattactgccttagaaccgacaaaagcggtcgttgcgccaactgctgcagtcacccctacgccgattaaaattttatatctggttttcatcgtatcaacctccttgtactttaatcatagtttagcacaattcgcctgaatttaccgctttcaaccccggtccttactttaatttaatactttggagaatgtaataccccttatccttatgaataatttgcacgttgccaaaaatgctcatcatcgttttcttcgctgatggggcaccttgtttcttttggatcacaacgttcaattcaccatctggtaataagtgatcataggcaccagtcaaaatattttgcaccacatcttttcccgctctgattggtgggttggtgaagatggcggcgtattgatccgttacgttttgatattcagctgattcgaatacagtaacgttggtaatctgattcaattcactgttcttacgtgccaaatccaatgcccgttcattcacatcgaccatgtcgattcggcgctctggtgcgagcttagcaatcgtcatcccgattggcccgtatccacaccccatatcaagcactggaccagctggcgcttcactcagatcgaccgctgctagcaatgcccgtgaaccgtaatcaacagtgcttttagagaataccccgttatccgttgtaaatttaaaattaaagccgtgtaattcaaacgtccattgccgctcagcgtgttcaacgtctggatttttagaatagtaatactctgtcatcttttttcctcatttgtcgttagttatctgaaaatttcccaatttgaactgacttcatcaaacgacctagcaagccaccaggatgcggttgatccgcaacccgttgattaacgaccattaaaacttgaaccatcgtgaaaattaatgaggtccgtttttgataagcgatatatttcgaacgccattccgtcgtatatttcttcttataggtccgtaatccctggaatccgtagaagtgatagccgtattcatagatcagatgagcgattcgttcttcaataaagctaaactcggaagtccctacatttgcaagaggcgccatgccgaggttgaagtacgtgtagccatccgttcgattttgttcaaagagattaataaagatctcatccattataccagatggcgcgtcttgtctgtgacgcattagatcaatacttgcgacttctttggttcctgttggcatttcgttagcgaaagcaattaattggtgatcggcattatagacaactgcaattggggctttttggaggtatgcttcatcgaaaaagcctaacgagaagcctttttcaacgcgactacccaaccaatcatcagaaaccgctttgagttctgccattaattcggcactaaatggtgggtttaaaatttcaaattgatagccttcacgttcaaacttattcattaaggcgcgttcagcccgccgtttcttaccagtcatcgtgaagtccgccaaacggacgtagccttcttcaccaaacttgataaagtcaaacccgatttcatgcagttgcatcgttaattcacttgaaatttcgtagaacgctaaatgacaatcaatcaaatcagcgtcgtgcatcatctgttcaattgccggtaaaattttagccggatttccgactggttcacccattacaattaagcgatccgcttttttacgataaagcaagaatacctgatcttctccttcttcctgatagaaataaactgatttatcccgtaagtatgccaaatgactgacctcattgccgccgtaagtgttaatcacgttagcaattcgtgcttcatcatatggcgctgctattgaacggccccctcgactgagataacggtagacgagatataaggtccctgcggcaaccaacatcccgataaaaccagccaaccagactctttcggatggaaataaaagcgctgttggtacgggtttgcgatgccgtaagtgtggcgaattggcaatcccaacaaagccgtataacaagaaggcgcccacgaaaagtacaccatccacaatccgatcattccatgaaaattcgatccgttcacggtataattcgcgtttcaataagaaactagctacgagcacaaaagttaaaaagacagcgagtttgattgagaaatcccgccatagtgtattggtaatcgcaatcaccaatagcaccatcaacggccagaaaactttttgaacgcggttggcaacgccgcgggctaaggccaacatgacaaacgctacaatgatgtttgtcacacgatctaagaagaagaacgtgtatgggtagagctgtccaatcactgtgttggtaatcgcaaagttcgggacagttgctactaataatagaatgatgcttgaaatataaaggaagaaaacaatgaagtgatgagcgattttttgcatcacctgccgaggtaagccctgtaaataatgatttaaccggctgcctgcatcgtgagtaaataaaccaacgccgactaaaaacggcacgatgtaataaaagactcggtaaaatgacaaccagacaacggcgtccgcattttgaacgccgactgcactcagaccaaagatcatgaacaaatcaaacgttcctaagccccctggtaccatcgaaataacaccaatgatgttggcaatcatgaaaagtggtaagacttgtaataagtcacccttaatctctaagaaataaccaatcgttaagaaaaagccgcccgcaaaaccccattctaagaaagaccctaatgttaggcgtaaaacgcgttgcatcgaaagatctttgaaaaaggccgcatttttaaagcgcgtactaatcatcagaccagggaaatacaacgaaccgcccactagccataaccagtagttggcatacatcccaccaataccaaagccaaagatcaaaacgacactaatcagacaccagattgacaggccggctaataagaacagcgcaatttttgaaatcgcaattaagatttctttttgtgacgcttttttaccatagaaattggcccgtaaactcgcacctaagaagcccccgaatccggcaatgttcgtaaacgtattgacgatccaaccagatttgactttataccagaatgaatagtcctccggcagcaactccgcaatcacgaaatcataattgagcattggcaagaccgccacaaacccaatcaccagcatcgctagcaaggtccacggactttgtgtcgttaaactcgctttcaattgttccccgttcaagtcccggaaaatccggccgacttctaggataacaaagaccatcaccgaaaggatgaagatgccttttaacaacgttaggtgtcgctgaattccttcatatatgtgtttgccccattttcgcatatcaaccgctccttaacttaattaatttaattataagctatcccaaggcaaaacacagtaaaatgacaattatgttagatggctgttagattatgattttcgcttattacttacccggagcacaatccgattcccgttcacccgacaatcaatatcctctgattgcctttttagttctcaacagcaatggctgtcgcttaagatatggaatccatatttagcatcgtgttattttgtgcaactcgccatttatgttttacaaaaaaatatgtaaaaaaagaaccccacattagtggggttcttttagaaataaaacgtgctttcattaactgctttctgcgctttgctacatcagtcaaatcaccggctgattaggcaaatgctcaaaaataacccgttaatgacgcactttattttgaaacgtgccattggcgctagatttctgcgcttaactacaaatcgggcatcatggcttagatcgccgcgatgcccgattttaggttagtgctcaaaatctaaacaagcgccaagggcgctctatttaaattatttcaagttaacgacagcgccaacttcttctaatttagctttcatttcttctgcttcgtctttagcaacgtcttctttaagagctgaaggagcgttatcaactaagcccttagcatctttcaagcctaagcctgtgatttcacgaacggctttgataactttaaccttttcttggccgatttctgataattcaacagtaaagctgtctttttcagctgctgcgtctgcgccagctgcacctgctgctgctactggagctgctgcagaaacaccgaattcttcttcgattgctttaactaagtcgtttaattctaagattgatgattcttttaattgatcaacaattgcatttacgtctaatgccatttttgtttcctccattttgtgggtaatattttttgataacacttttaactacacaattttaaattatgcagctggttcgtctttgctgtcggcaactgctttaacagcatatgcgacattgcggactggtgcttgtaatacagaaagtaacattgataataaaccgtcgcgacttggtaatgtagccaaggcattgatttcatcaagtgttgccactttaccttcgatcataccacctttgatttcaagtgcatcagcactcttagcaaagttagcgatgatcttagctggtgcaacaacatcttcgttagaaaatgcaactgctgtagggcctgtgaatgtatcatccaaaccttcgtaaccagctttgtctgctgcacgacgcaagtaagtgtttttaacaacttccatttgtacgccagcttcacgtaattgtttacgtaattcagttacttgttctactgttaagccacggtaatccataacgacgatagaaacagcactattgaatttttcaacaactgtgtcaacaatttgtgctttttttgcaatgattgtttcgctcaattgattcacctccattagatttgtaaaacttgtggtcaagagttccttataaaaataaaaaactccatgtccaccaagacatagagagggatttcaacgtatcttcctcggcaggatattaagcctattggcacctgagtcttcggtagcataaataaccaactacaaatatagcatggattccataaagcgtcaatcattatcggcacttaattttagttatcctagcattacgttttacttattttatttttctgaaaaaacggtttaaaattgagactatcaagaaaattaatcgtaagaggtgcagttttttgaataatattttagtcgttaacgcgggtagttcatcattgaaatggcaactattccaacaatctgatttaaccttactggcaagcgggctcatggaacgcatgaacacaccagaagctagcttcaccttcaagttccaaggtcaaaaagaacaagtcgccattgctaatctttcctatgaagatggtgttcttcgacttttgaaacaacttgaagacaatggcatcattcattcacccgcagacatcattgcagtcggccaccgggtcgttgccggtgctaccacgttcgaaaaaccaaccattattgatcgcaccaacttagatacattaaaacaactcgacaagtatgcacctttacacaatcccgtgcaagttgactgcattgaaaccttgatgcatattttaccaactaatgtccctcaagtggctgtctttgatagtcaattctatctcgatatgccagatgaaactagtttttatggcttaccttatgaatacagccaagactatcaaatccgcaagtatggcgaacacggcattagtcacagctatatcttacaagcaacagctgactttttgaaagaacccgttgccgatttaaaattaattacacttcatttgggtggcggttcttcaattacggccagccaaaatggtaagcctgtcgatacatcaatgggcttcacaccgttagaaggcgttccaatgggcactcgtgctggttcattagatgcggccatcgtcccattcttaatgaacgaattggataagagtgccgatgacgtcatcacgcttttgaacgccaaatcagggattctcggcgtttcaggcgtttccgctgacatgcgcgatattcaatcaacacgcgctaccaatccacgggctaaactcgcctacgacatgttcatcacttctgctgtgaagttcatcgcgagctaccacgttgaactcggtggtgcgaacgtcatcactttcacagccggcatcggtgaaaacgacgcccgtttacgtgctgatatctgtgccaagctggctgttttaggcgttcaaatcgatcttgaattgaacgaaaacggctcaggtgcccgtcaaatcagtacccccgattcaactatcaaagtcttgatgatcccaaccaacgaagaattagcgattgctaatcacgtcctagcaaccatctaaattaatcgcgaattatgagagagccattagcgtttttcacgctaatggctcttttttgataaaataaaccctttttatcaccaaatcacgaacgatatttacaaaataataaatatttttcacatttttcttaaaaacacgattgttttgttgtacaataatgccaaggttcttaaaatactaattcagaggtgcataatggataaaaatattgatattgcaacagaatcacgaacgaactggttcgaacgtcaattcaaaattaaggcaagtgggtcgaccattaaaaccgaaatcatcgccggaattaccacttttattgcgatgtcatacattttattcgtcaacccaactatattaggcgacgccggcctagataagggggccgtctttgtcgccaccgcattaactggagtggtcggctgtttagccatggccttcatcgccaactacccaatcgccgttgcacccggactcggcagcaatgctttcttcgcctattccgtcgttttaggcatgggaattccttggcaaacagcacttgccggtgttttcgtcgcttccctccttttcatgcttgtcacggtcttaaaagtccgcgaagtcgtgattaacgcgattcccgctaatttaaaagccgccatggccgtcgggattgggttattcatcgcctttaccggattaaaacaagggggcatcgtcgtcagtagtgctaaatcattcgtcaccattacgagttggtcagatccgcacgtttggttgaccgtcttcggtttaatcgtcaccgttgctctattagcccgcaaagtccctggcgctttattcatcggtttggcggccacagccaccatgggagtcgtgactggtctaatcgcaatgcctcacagcatcatcgcttcaattccaagcttagcacccactttcggtgtctcaatcatgaacatccacaacgtcttcaatgttcaaatggccgtcgtaattctcgtctttttcttcagcgtcttcttcgatacaactggaacggtaatcggacttgctcaacaagctggtttcatcaaggacaacaagatgcctaagtaagtcggcaaagcccttttcgccgattcaacctcaatgattgccggttccgttttcggttcaaccccaactgcttgttacatcgaatcatcaactgggattgctgctgggggtcggactggtttcaccgccgtggtcgtcgccatcatgttcgtcttaagcttattcttctcacctttactggccgttgtgacgtcgcaagtgactgccccaatcttaatcatcgtgggctcattcatgatgaagtcaattgccaacatcgactggtcagaattcgaaacttcttttgcagccttcatgattgttctgtgcgtcccattaacctataatatctcatacggtttagcattcgggctgatcacttaccccatcaccatgattgctgctggcaaaggtaaaaaagtgcatccgattatgtatgtcgctgcgctcttattcctattattactcttcacaatgcacgaattacctgctaaataaaggagattactcatggataaaccaactttaaaacaactaattgatcaagctgccggccgtcaagctgccgacatggtcattaaaaatgcaaaggtcgtcgatgtctataatggccgcattattgaaggcacactcgcaattggtaatggtcgcttcctcggtatcagcgacgactaccttgcaccaaaagttatcgatgcacgcggccaatatgttgtgccaggtttgattgatccgcatattcatatcgaatctgccaatgtctcacccgctgtcttcggatcacttgtaacaccacatggcacaacgacgatcttggccgacccacacgaaatcgtgaacgtcgctggcatgcggggcttgaatacatggtcgcatctgccaaaaagacagcacttgatatcaagtacaccatgccctcgtgtgtgcctgctgctaatccaaacctcgaaacatctggtgctgtaattaccgctgatgagattcaacaatcttatgaccaaggcctcacttacggccttgccgaattcatgaattatcccggtgttgtcaatgctgatgatggcgttttagacgaattactcgtttcactcaacgcaaataaactcatcgacggccactcacccgctttaaaagaacaaggcttaaacgcatacgccgctgctggtattcgtaacgatcacgaatgtacccaagtcgatgaaatgctcgatcgcatcagtcgcggtatgtatgtttatctccgctacggcaccgtctctaagaatatgccaacccttttgaaaggcgtgacgccgcaaaacgcacgtttctgttgtctctgcggtgacgacttacaatccgtaaccctccgtgaaactggccacttggatgaaagtatccgcgttgctatcgcaaacgggatcgaccccatcatggcaatccaaatggccaccatcaacactgcccaatgtaccggcttagctgaccgcggcgggattgcacctggtttgaaggccaatttcctattggttgatgctctcgaacaattcagtgtgaatcaaaccttcatcgatggtcaaaaagttgctgccagcggcgaatacctactaacaactgaagattcagttactggttttgatgacttgttacaaaccgtacacctcgatacattcaccgctcaccaattaaaactcaacctcacaagcgataaaacccacgtgatcggcttacaaagcatcagtcggacgcaaaatctcgtcttaccggtcgctcacactgcagacggtgatttccaatatcatcctgacgaagacatcgctaaagtggccgtagttgaacgacatcatctcactggtaatgtcggcgttggcctgcttaacggcaacggtgcgattgccaccagcatcggccacgatagtcacaacctcgtagtagtcggcaccaacgacactgacatagtcgttgccatcgaagcgctcaaagaaagccaaggcggtggcgttgctgttcaggatggccaaatcatcgcgacattaccatttgtcatcggcggcttaatgagtaacgaacccatcgacactttaattgaacatcaaaaggccttcaatgctatttgccacgataaactccacgtcaccgctcacttcgatccgactatgaagctcggcgcaatgccactcgacgtcatcccgaacttgcggattactgacaaaggtttagtggatgtcacaaaattcgaaattatcgacattaatgcttaattatagcaacaaaaaaagcgctcatcctttcggatgagcgctttttgcattaccaacttagaagctagcaacgtcaactttgacaccagggccaaatgttgagctaactgataaacttgtaatgtattgacctttagctgaagcaggacgagctttgataatcacgtcttgcatcgctttaaagttttctactaatttagcagcatcgaatgataccttaccgattggtgcgtgaacgataccagctttatcaacacggtatgccacttgaccagctttaatgtcgttaactgctttagtaacgtccattgtaactgtaccagtcttagggttaggcattaagcctttaggtcccaagacacggcctaaacgacctacttgagccatcattggtggtgtagcaacggcaacgtcaaagtctaaccagccgccttggatcttttcaactaaatcttctgcgccgacaacgtcagcaccagcagcttcagcttgttttgcttgttcgccttgagcgaaaacaatcacgcgttgtgtcttacctgtaccatttggtagtacgacagcaccacgaatttgttgatctgcttgtttaggatcaacgtttaaacgatatgcaacttcaagagatgcatcgaattttgcaaaatcaactttctttactaagtcgattgcttcttcaacagtgtatgctttagtagcatcaacttgttttgcagcttctaaataatttttaccttttttagccattagggttttcctccttgcaattgtggtgaacggtttttgacctcccacttgatttttcaactttcattgaaaatccgactgaaagtgtcaagcatgaattaaccttcgacagtgaatcccatgcttcttgcagtaccttcaaccatgcgcatagcagcttcaacgtctgcagcgtttaggtcttgcattttagtttcagcgatttcttgcacttgagctttagttacagttgcaaccttcttagtgtttggttcgccagaacctttttgaacaccggcagctttcttcaagagaactgctgctggtggtgtctttgttacaaagtcgaatgaacgatcttcataaacagtgatcacaactggaattaataaaccagcttggtcagctgtacgagcgttaaagtcctttgtaaagcccataatgttgataccagcttgacctaaagctggacctactggtggtgctggagttgctttacctgcaggaatttgaagtttaacgatgtttgctacttttttagccacgaaacatacctccttaagtccgtgatgtggttaagatggccattatatttggtctcccactagtgtatgaaaacataccttaataatataccaagcaattgccgaaaaagcaaggcgattccattaatcgcgccacaagaaatcatcaatggcttgatcaactaaacgattttcgtgcaacatgctatgtgctccacccggtccacgaactaacatctcctggtaatggcgcacgtgtccttttaataggctacgcaatgcaaaactactatcgactgctaccgaaccatcgtgtcgattagttcctagtaactcgccagcaatgtttaagacactgatcgcagttggaaaatacttggcccgcacggctaaataattataattacgtgttcgtttaactggtccacgactggttaactcgctccaaaaaacaagtggtgtatccggaccaattgatggatcattaactggcgctgccaacaatatcactttgtccaccacggcatggtctgatgtcaacaaataacgcaacaccgtaattgcgcccatcgaatgccctactaaattaacttgcgtaacgccatacgcttcttttaagtgttcaataatcgcagctaaccaacggacttgatcttgcacatcggcgcggttattagcaaataagacttgaatcgttgggttattagcctgcaacgccgcgtctccatccacatgcaatcgaccgtttctgcccacccaaatgaccatgctcttcttagcaattccggctttttgtaggcgcccgagtaagtgaccgaatgaatagcgattcccccgatagccatgaatgaatagcgttggttgttttgtatataaacgtgcgcgcggccgccaatgtgccgaaacccggattaatttgtaaaaatccagtcctgccagtaagactaacaaaaaaatgactaagcccactgcaattaatatttgatcaatgatataccacatcgtcatcacatcattctttcgaaatagacactattgattgttcaaaaaaagcggctgagacaaatcatctttcgtctcagccgcctatcttgttggggcttgggacaaatcctagccccctactttaattgttgaaacatgctttttgaaattgactcttgcacttaactacatttgtcaaatcggcgcttgcagcaccaattcgccaaattaggttaatgctcagagtcaatccgtttcaaacgcactcttttttcgaaacgtgctccttcagtcatcccgactgaagtcgcactctaaactagttcgtctacttggtcgtagtctaattctgttgctgtttcacgaccgaacatgtcgatattaacctttaatttcatcttttcgtcgtcaacttctgtaatttgaccgacaaggccagcaaaggccccttcgataatcttcacagattcgccgactttgaactcaacatccaaatgacgagtgctcatgccaagttgacgcaagatttgtgtgatttcatcatctaataatggggctggtttgctacctgcaccgtgtgaaccaacgaagcccgtcacacctggtgtattccgcacaacgaaccaagcttcgtctgacatcaccatttcaaccaaaacatagcctgggaaagtcttcttcatgtcgactttgtccttaccgtttttgatttcatgttcttcttcttcaggcaccacaacgcggaaaacattgttctccatccccattgattgggcacgcgattccaagtttgccttcactttattttcgtaacctgaatatgtgtgtaagacataccagcttttttcgattgattcaaccatgtgcgttctccttttaaataccaaaataaaaaaactccgaccacgcgaagttttttgcttgccattagtatagcaaatccgacttaattaagccagttctaaaagataaataattgtagtacttttaagattgcaaaatcaacaacgccaaagaaaatggcgaataaaacggaggtcatgacgactgttgatgtatctttacgtgtttgtttggcatctggccaactaacagttttcatttcctgaccaacactcttaaaaaacttaatcatcttatttcctcctaattagcgcgtttctttgtgttgtgagtattgcccacaatgtttacagaatttgtttaactctagacgttctgtccgattcttgttctcagcaacatagtagttacgtgagccacagacagtacaggctaaggcgactttcttaacacccatatgaaaagcccctctctaattgacgtttatcccatttactttatcatgtgttgaccaaactgtcaatgtggtggattatccccaccaggtcgtgcggacaatcgctaataacaagctgacaatcaagctaatattgatcgccatcgcattttgaatcgcggtaataaaggtgacatccttcagttgccgtgtattaaaccggcgattattgcgcaaaatgacaggaatcaataataacaatagtaacgattcaatcggtaagaccttcgtaatcactgccacaacaacggccactagtgagaaccaaatcaacgtattatacaaccgcaacgcccaggttgttcctaaataatgcggcagtgtataacgttcattgcgccgatcttgatctagatcacagatattatccgccaacataatgttcgaagtggggattgcaataatcacaccgattaggcatagactaagcaatgttggtaattgacctttaagggtaaacgttggccaatcaaaatggagcgccatgatgctgtcgcttggtacgttgacatagaccatgataaaaaatgcaccaaatgattctgtcacaccactcaacaattcaccaaccggcatccgcgatagcggaactggcccgaacgtgtaaaagacggccacaaaaatacaggcgccaccgattaatagtaataaaatgttcgtttgccaaaccaaccaaattccagccgccatgctgaacaataaaaaatagagcattaaatgcagtgccttggttggcgacaaatgtttgcgcccaatgatattcgtctgtgcccgataatccagatcaactgctttgtagtaatccatcacattattaaagccagtcacaaataatacaatcgaaaactgggcgacaaaataaacaattgtcgtcactggattcagctggccattaacgtaccaacaataaacaatccctaagattaagggcaagacactcgccgtcttgacctcaatccggacaaattctaaaaacgttttaaaagacatctcggacttccttccattaaaaaagctaggacaaattgacttgtcctagcttcatcgtaccttctagcagacagttacccattaattcattggcagctgactgccgaagtcccgttttattcaccgtaaacgatgttatcaactgtaatcgttgctgtatttcctttttgtgcagcattgactaattgttcagcatagttgacgaagctgtgtgatgattctgttgcaccagaaacaacatctactttgcctggttcttgtgctttgacgaattcagaattcaacttagcgatgtattccttaggatcagtcttagcaatcttcttcatttgtttgttgtatgcagcatcgtcagcttttgacttgccatctttattgatgttatcgaatttagattcagtgattttaccgtctttaaccaccattgtgaaaactgttcgatagtcatggctgtaattcttttcttctaacttatatgtgccatcttgcatcttagcaccattgtcgatttcgattgtttcagtgttgccagcttgagcagcttgcactaattgttgtgcgtaattcttaaatgaatttgagctatgagttgcgcctgatacgacttcgatgcttgaaacatctgcacctttatctgtaaattctttgttcaacttaggaatatattctttaggatttgtttttgaaactttcttcattttttcgttgtatgtcttgtcatcttgttttgacttgccatctttatcaacgtaatcgtaagttgtctttgtcactttgccgccggcaacggtcattgacatcttaacgcgataattattttcgtagttcttttcttctaagttgtaagtgccgtcttttaattcaccgccggcaacttgtttcttagcggttgcttttttgcttgatgattctttgactgaactagattttgcctcttttgaagatgaatctttagcgttattactattaccacaagctgctaataccattgctgacattgcaacaactgataaactagctaatgctttacttaatttcataattttcccgcccttttcataaataatcatatagtttgtatcaaccttcacacaaagtcagtttatcttttttatgtaaaaagttcaagtcttttaaatcacttattttacggcgattaactttggttttacacaatttaaaacggtttccttaatagtcatcaatcccattaatcttatccgtgaataaatagacaatctttagtttattctgtataatggatactgattgaaaacgcatttatttcatttaggggtggctcatcatggctcaaaaaaacatcgtcatcatcggtgccggttttgccgggatctatgcgactaaaaaacttgcgaaatattacaagaagaatccagattatcaaattacattaatcgacaaacattcctactttacgtatttaacggaattacacgaagtagctgctaaccgcgtgccagaagaccacgttcaacacgatttgcaacatctcttctgtcgccgcaaaaacgttaagttggtgaccgatacggtaacccgcatcgatcaagcaaacaaaaccgtcattactgaacatggacgctacgcctatgatcaagttatgttggggattgggagtgaacctaacgactttggcacacctggggttgccgaacatggtttcactttaggttcatgggaacaggctgttgaattgaagcaacatattatcgatgttgttcgtcgtggggcaattgaacacgacccagaaaaacgccgggcccttttgaatatcgtggttgttggttctggctttaccggaactgaaactatcggcgaattacgcgactggcgtgatgaactagcagctgataacaagattgatcccgaagaaatccaatttacaatgatggaaatggcaccaaccatcatgaacatgctcgaccgcaacgatgcagccaaagcagaacgctacatggctaaacaaaaaattgatgttcgcaagaataccggtgttacaggtgttcacgaaatgcatgttgatttaaatgatggttcaactttcccaactgccactctaatctggacagctggtgtcaaagcttcctcacaagcggcacaatttggcctaacaaccggtaaagccggccgaatcgtgacaaacgaattcatgcaatctgttgacgatgacaagatttacgttgtcggcgatgtggctttcttcgatgaaactgatgacggccgcggtcaaccccaaattgttcaaggcgccgaagcatctgctgcaacagccctaaagaacatcatcgcaactgaagaaggtaaagcaacagtcccatacaaagggagctattccggcttcatggtttcaattggttctcgctatgcggttgccaacttgatgaatttcttccatctcagtgggttctttgccacattagttaaacatttagtcaacatgctctattttgttcagatttattctggctacgatttattccactattcaatgaatgagttcttcagaacgaagaacgatcgcaacttgatgcgcggtcatatttcacggtatggtaatgttttatggacagttcctgcgcgaattttcttaggcgcaatgtggcttgttgattgttgggacaaggttcaaggtgaaggttcttggttcaccaataagctccggttaccttttgactggcttcaaccagctgtcaccagcggtgcttctaaagcggcggatgcaacaagtgctgctagcggtgccgctgcaggcggggctgctgaaccagcaactgctaaagtcacattcggcctttcttacttattcggtcatgatccaatgcccgtcttcgataagatgccccactggttctacagcatcacgaaggtcttgattccaaaccaagaagtcgccttcttcatgcaaaaaacaatgaccatcattgaaattttaattggcttagctttaattgctggtctcttcacttggttaacgagcgcagtaaccgttgcaatggttatcacattctgcctttcagggatgttctattgggttaacatttggattattccaatggccctcgcctgcatgaacggttcaggccgtgccttcggattagataaatgggttgttccatatttacaaaaacatctcggtcactggcgctacggccaacaacgtgcactatacaaaaatcaatgagtgcgtttgaaacggtttgactttaagcattagcacagggaagcgaattagcgacatagtcgatgatttgattcacagcgctaaacgcagaaagttaacttcaaagcacgttataaaactgagtgcatcaaaagcgtttattctatgcggattagcaaaattagacgaataactagcgtagctagttgtttggctaatagtgctaaacgcaatagaatgcttttgaaagcacattataaaagcaattcacagctatcaaaaggagggggttatgacagacaggcttttgtcataaccccttttattgctattttagagagaaagactgacgcctatgtttaaacaaattcgcgctaaccgttacatcaaaatgattcgccctggtgatataatagtagtcatcggcctgtttattctatcgtttgccccagttgctgtttttagttggcacgaatggcaaacgacgcaagcagcggattcaaacgcgcaggtattgacggcctacgtcaaacaagatggcaaaaccgtctacaaagtgaacctaaccacccaccatggtgttagccacttcacttatcgcgatgccggcggtgattacaacaaaattaaggtaaccgatcatgccattgaggtcactgaagccaattgcttcaatcagattgatgttaagcgtggcaaaatttctaagccaggccaaaccattgtttgcttaccacacaagttactgattgaaattaaagccaaggatgggaccgacacgggcgggatggtttctgcctgatttaaaaggagtacagcgatgactaacgatcaaacgcgtaaatacatctatattgcactcttgtgcgctcaagggattattattggccttgtcgaacgcgcgattccatttccatttgccgtagccccgggtgctaagttgggactagccaatttaattaccatcatttcgttatttaccctaccggtcagcgactgctttttattgatggtgatgcgaactgttttatccgccttgctagggggaaccctctctacttttatgtatagcattgctggggcaacgctaagtttctttggcatggtactcctcaagcaatttagccgccgctttatgagtatgattggcatctcagctgctggtggtctgctctttaatgtcggtcaactctgcgtcgcgagtttcattgcccagagttggcaagtcctcctctatctaccagtgcttgcttttctcggtattctcgccggaattgcggtcggcgtagccgcgaattttttattcgaacatgtcaaaaccctgacttttttaaaagcccaacacgaaatttaatttaacaaggagttaattatggcgaaagtacatgccatgtggcagaactatccagaaatcgaaaccgaacttgcgcaaagtcttgcgctcattgaagacaacattcacaccaaaaatcaagccgtcaccgacgccattttaaagatgattagtgctggcggcaagttgctccgccctgcttactgcttattattttcacagtttaatgcagtcgatcgacagaagatgatcgcattagccgccgctgttgaaacgctacacactgcgacattaattcatgacgacatcgttgataattccaatttacgtcgccatcaagaatcgattcaagcccgtttcggcaaagatgtcgccgtttacgctggcgattacttattcgttgtctgcttcaagttactagccaattatgcgagcgatttgaagagcatccaatttaacagccaaacgatggatcaaattcttgacggtgaactcagtcagatgacaacccgatataatctcgatttaacccccgaacagtacctacaacaaattaacggtaaaaccggccaactgttcgcgctcagttgcttcatcggtgcttacgaaagccaaaaaggcttgaagtttgcccgccaagccgagaaaatcggcttaaatatcggtctcgccttccaaattctggacgatatcttagattacactcagaccgatgtcgattttggcaaaccagttctcgatgacatgcgacgcggcgtctactcgattccgttaatcatggcactgcaatccaatcgccaaacattagcaccctacttggaaaaacaagcagctatgactgatgccgatgtgcacgctgttcaaggcatcgtccgtcaatctggaagtgtcgaaaaagcccaagcactcgcacaagattacacaaaccgcgcactcgctggtcttgcgaaactacccgacatgcccgcaaaaacaacgctacaacaattaactgaacgtttattaaccagaaaagcctaaaaaagacggacaacatgttagaaatgttgtccgccttttattctcgacttaatgctcaaaagttgaccaagcttgaatgcactcattttttaacgtgctcctcgaacagtcttctccggttaactgcaaaaagggcattatggcaagtcccgccataatgcccttttccctgttaatcctcaaagcctacccagttcgagtcacactctttttttaagctgtttatcggatttgaaccgacgacccccaccttaccatggtgatgctctacctactgagctaaaacagcatttcacggttgattaacaaccgtgatataagtatatcgaaaaataaaaagcgggtcaagcccctagagaccaacttctgtatcagaaagtgctaattcaaaatgttgttgtaagaatttagcgaccccgtcattcgtattcgtttctgttacataatttgcagccgctttgacctctggtaaggcattgtccatcgcaacactgtacttcgctgattgcaacattcccaaatcattttgcccatccccaaagacaattgtatgatcggcatcaattccatgaatcatttgaatctggcgaattgcagtggctttatcaatcccggttggaatcatctcgatgttgtctggaccagaagaagacaagctcatcacagcttgatccattaatcgttgtttagcggctgctaaactctctggatgaccgcgaccaatgataatcccgttagtaatctgatcacttaaattcaacaacatttctaaatcagtcaccggttgattatcaatatcggcattcaacaataaattccccgcatcgcgcgcaacaaacttggggatttcttgggtatagtaagctgtgtcagtggtaaaaaagtgcgcagataaattgggatctgctaaacatgcttcgtaagcagctttgagcgcttttttacctaaataatgcttgttcatctgatggccattttcaaagacagcaccgttagaagccacaatccggacatcatcgttaatttgccgcgaaattacccggccaagattgtacattcggccggtggcaatatagaaaatcacatcgcgtttttgtaatgttcgaatcacgcgtttggtcaaaggtgtcacgatttgatggtcaaggaccaacgttccatcaatatctgaaaaaactaagtaaggttccatatgaattcccctcaattttgatttgtaaccggtaacacttcttcgttttagcgtatttagatggggaattaaatagccaatttcgtttcattcacaatcaaacgattaatttatagcagtaagtcttgctatttaccatgacatagtttattatcaccttatttggtaattttaataatgtctgaaggagtttttggctatggataaagaaaatctcaatatcggtgatttagtaaccggcaaagtgaacgaagacctagatggtgcatttacaggaactgttgaaaaagtatatgaaaactccgctttaattagcattacggatttcgatgcagccgacaaggccaacgtttcggaattaaacaacaagatcgttgttaacctcaagcaattaaaagctgctaaagcaaaataaaatagaaaaaagcccaccgacatttatttaccggtgggcttttttctatgctttaatttcgctgacttgtaaagaagcattcaataactgttcagcaacgagcgccaattgctgggcgtcaaacgctggtttaaacaatgcagtgtgcaaaacaccgattagaccccaacaacaataattcaaaatataatcagcgttttccggctgctgaaatggaatcacccgcttgccgtgagtcacggtcaacgcaactaatttattcattaactgtgaatcgggattacgacacaatacccgtaacatagactcgttgtcttgcacatatgacaagacccatctaaagaaagtttggccaacaatctgtggttcagaaggcaactcaaaacgttctagcaactggctgaactcatttaaggtaaaatcttctgtctggcttaaaagatcgtagatatccgtataatgcaaataaaacgtccgccgattaatatcagcccggtcggcaatcatctgaattgtaatctcattaattgggtgttttagcaggagctcaataaaacttgtgcgaattaacttatgtgtccgtttaacccgtctgtcttgcagattaaccatctttcagcctccatttacatcacaattgactaacttgtgtgcattataacacagaaacacttagattgattattgttgaatcaactaaccatcgttatagtagccttaataacaagtcatcggaggtcggcatatgtttctaacaatccaagaattacgccataataagttaaaatttggcgcactgagttttatcatctttttaatcgttttcctagtactcttcatcaccggactagctgccggtttagcaaacgatagtggcgcggctattaaaaatacgccggcgacgcattttgttttacaagccggttcggaaagtcggttgagtcgctcggcactcacccaatctgattggcaagctctcaaacaccaatcactgacacccatcaacgtcacccaagccaccatcgagcggcctaaaaaacaaacaaaaactgatattgcctacattgcagttgacgctacgagcttcatgacacccaaagtcacccaaggtcaaaagctgtccaaccaagccactcaaaaagtggtggtcagcagcaaattacaagccaatggttaccaattaggcgacaccgttaaagatagtaccactggtcagcaatttaaaatcggtggctttagcaagcagatggcttatgcccatacgcctgttatttatttaaaccaccaccagtggcaaaccatttttccaacgcaaaagacgacctataacgcgtttgctagcaaaccgcccttgtcggttaacaagcactaccaagtgatcagcaaacaaaccttgattgataacatccctggctactctgcagaacaaagttcattgtacttgatgatcggctttttatacgtcatctcactgtttgtcctcgcaattttcttttatatcattaccctacagaaattacgggactttggggccttaaaagcattgggcacaaccacacgctatctcagccagcacatcatctctgagattggcttgttaacggcagtggcgattcttttggctggcggtatcattagtgtcatcgcccagtcaatgcctgccagcatgccgtttatgctcacagcaccaacgatcatcggcaccagcgttctatttttagccgtcgccatcctaagcgccctattatcccttattcaggtgattcggattgacccgatcacagctattggaggtcattaatatgtcagcaccgattttaacactcgaacacatcaccaaagattatcccgatggtgatcaaattaatcacattttaaaagatgtctccttcacgattcagccaggtgaatttagcgccatcgttggtcccagcggtgttggtaaaagtactttgttgacgattatgggcgcgctcttgcaacccacagccggtcgtgttaccttggccggtcaagaacttgcaacactcaatcgtaatcgtcaaacacaaatccgccgcgaatcaattggttttatttttcagaattcagaattaattccctatctaacggtcactcagcagctgacttttttacaaaaaatcgcccgtcatcgcgatcaacccgccgctgaacaattactgacacaacttggattaggccatcgattacacagttatcccgccatgctttctggtggtgaacagcagcgggttgccattgctcgggcacttatcaatcaacctgcactcattttagcagacgaaccaaccgccagtttagatgcgcaacgtggtcgtgaaattgtccacttaattcgcgatgcagttcatgaacaaaaacgcgcagctgtcatggtaacacatgacgaacgggttttagatctcgtcgatcacgtttggcgtatcgaagacggtcaactccgccaaaccacataaaaaaaacggtcctttcacaacttagcgttgttgaaaggaccgttttttagttccagaggatagctactattattcgacgttttcaaatttaccccacaagttcattgtggattgaatattaacaaaggcattcggatcggcatccttaacgacccgttttaattccgttagatcgtattttgaaacaactgtcatgatcactgttgtttcttggttggtatacagaccagttccatctaattcagtcgcaccatgaataaagtcacgcattcgcttcttcaattcttcaggtcgcttggtaaaaatcgtcacagtcaccttttgttgttgaatatagatataatccatcaacaagcttgaaacaaagatttcgacgatactgtataaggcagcaccccaaccaaagaagatgcccgctgcaagaatgatcattccgttgatgatattattcacaacaccaacccgtttgccagttaagcgcccaactaacgtcacaatgacgtccgtgccaccagttgaaaaacccgctttaaaacacaagccaacccctaaaccaatcaatgcacccccgaacaaggcacctgcaaatcgttcggtgacaattgggtgaacaggtactggaatgaccttcaagaaaaggacactcgtaaaaacagcgacgatactaaaaatcgcgtactgatgattaatcttgaaccatgccagaatcaataatggcacattcaaaataaagaccaacatcgcaacacttaatgagccgcccatatagctgactaacgaggttagtaattgggcaatccccgtgaccccactcgaatacgtcttcgccggaatcaagaacagattaacactcaccgccgccaaaaaaccgtataccatcgcgataataatttttttcgaatttccttttaaagcaatcactgtagcacctccatcgattaaaaaagccacactccccccttggaagagtgtgacaaatgattaaagtgcgcacttggctataggttcttatccatgacgaaggtcaacttagaaagttgcgttccttctgtcaccaattgcgctaacaaatcggttgttgcttcatggtaatgtgcagcaatttcatgattttgctgggttaagaaatcagtggcattcgcttccgcctttacagcagcatccaccgtagcaatcttagttcttgcccattctgataatgctttttggtagtcaatatcagctttcttaaaggccccgtagtgtgattcaacaatcattgctaatgcttcatataaccagtaagcgttcttcaactgcatcttcgctggtagttcgcgataactttcatccgtatccatcgcattcgtaaagaatggtacgtgtggacagaatgttggtacccccaaacctaaccattgaacaccacgcacagcatctggcacattgtttctaatctgacagatatgtgagttttgcgtccgtgaaagtgaaattgaccgataaatcgtcttttgttcttctgtcccattaccaagtggatcgtaaatagtttcgttataatgtgattttaacacatattgaacatcttccacacttattttacggttagccttgcgaatgaaaggcaagtcactcgattcaggttcttgtttgatttcagggttcaaatagcgttgtgcataccaaacccgtggtgtgttatagtgacgatctaattcagtatccgtcccaaaaatcttacggaagttccattcagcttcactcggattcaagtgattttcactgacgaattcttgaataccttctgaccacatgtaattttctggatcattaaagtcgacatcttcgatggcaatttggttagcggcaactgcataacaatcatccggaatccgaacagcaacccagtgatgcccagtaacaatttcttgataccaaacttcattttgatcactgtattgaacgccattgccttcagctgaaccgtatttagcaatcaaatcccccatcaattgaaccccttgacgtgcagaatcgatgtatggcagaaccaacgtacacattgaatcttcagctaaaccttgcttgaccaacggatcataagctaatacccgttcgttggcataaacactttcagttgcggagagggcgacatttttttcattaatcccgtcttcttcatttaaaccatcacttaaatcgccgttgggggttgatgtgtaacgataaccgtccgtcggtaacggcatggttaagccgttatattttgaaacatatgtctcatgtcgatcatgaactgctggttgtacgaagaaccgtttaggatggattgcatagaagcgatcctcatttcgcgaaatcatcgtagagccatcaattgacgcattcttccctaccatcattgaagtacatgctgataattcgattctgtctgtcatttgaaaaactcctcgtaagatatatttataagccgttggcttacaataaaatttaattattactttgatactgcgggattcttcagaatataataggaccatggaatggatctatcgggaatttgctaaaaactcctgtagttaactctactttagtaagtccgttacccgagtctttacgctctctcccaactcactagctgttttcaatcaggcttatcttcaatgtagtagtttgaaggcggcataagtccaattggttaaaattctgttacgcgaggttgtagctgtgtaaagattttctggggaatcccgcagtatcaaagcaagttccaaataactctcgaaaggaggtccttcctgtgaaattatttgttggtttagatattagttctgaaaagattgatgcttgttttatgaccgatgatagtaacttatcaatcctaaatcgtttaagtgttgctaacgatttaaatggtgcttctgaaattaaagccttaattttaaaacatcacgcagaagtatcatttgaacagattgtgattggtatggaatcaacatcactatatagttttcatccagctatgtttttccaagaagatgcagacttaaatgcactaccaacggtagtcactgttgaaaacccatttaaaatcaagcaatattctcgtgtcttcgatgaagacaaaactgataccaatgatgccatgcgaattgctgactacttacgaattcaacgttttacaacgtcacctatcaaagaagaaaaatatatggcacttcaacgtttaacccgtactagatatcaactagttaccgaattagtaacggttaaacaacatttcttagaaaacttaacttataaatgtaatacgcttagtaaggaattaaaatcagaatctaccggcatttttagcgccacaattgtacatttaatgactgaaaactactcattagatgaattagccaatttaccactagaggacttcgtccaattgattcaaaatgttggccgcagtaactttaaaaatcctgaaaaactggttaaaaccattcagcgtgccattaaaaatagctatcagttgccgcgattaatgaatgagtcgattgatattattctcagtaccttggtagttcaaatgcgttcattacagcaaagtattaaacaaattgataaaggtatcgaaaaactagttgaaataattcctgaatatcaatgcttaaccagtgtgccaggaatcggtaaggtttatgccgcaggtatcttagctgaagtcggtcaaatcgaacgatttgatgatcaagcaaaagtcgccaaatatgccggtctatcctggaaagttaaacaatctggaaattatcagtcagaagtcacaccactaacaaaacaaggtaatcattatttacgttattacttagttgaagccgccaactcggtaaaaaatcacttacctgaatacacagctttttataaaaagaaatataccgaaaccccgataaataagcaccgccgagctattgttttaaccgccagaaaatttgtgcgtttggttgatgcgctactacgcaatcaccaactttacacaccaccaaagagtgtgttgaaggaataacgtagttattcacgcaaatctttggaatacctactaaaatttttatgaattttaagtaggcttagtttagtgttgccaattttgtaaaattacacgatatttatatcaattatcttcttgacttattaccactagactttttattaaaaatgtgattcactaattgattaataaaacttagtcggttacccgccggatcaaatgttctgtgtgttctagatgattcaaatacacgagtaatcgttcatacaggtattcaccggcttcatcatactgtcctgccagtgcttggccaatctggtggacactgcgttttccattcacatgcctaaagacaaaactaccataatcatcaagttccagctgtgtttctagcggaatcttcacatgcaaacgccgtaatgtccgttgaatccagtgattctgcggccgaataatggtgacctggccagcttgtaacttaaactgaacttgcggatttttttcatagatgagttgttctaaatcaatctccgctttctgtcgtcccatcttctgttgcccctcctttatgaatcatcataagtggcacagtaatcgaaacaaccatgacaaccaataagataatccccattgcattggtattcgcaaaaccagtaatcacgcggtcttttaacacaccggttacgtggagaataatcccgattaaaccaataattgaaccaccagcaattaaaccggatgataaactaatcccactttgaacccgattattcttaatcgcttcatcacgcgttgctttttcaataaagactttaatcaaagcaccgatcaagatgattgaagtggttgaaattggtaagtaaaaaccaattgcaacggtcatgattggtaaatctaagaagtagaaagctaatgccatcacaaccccaacgataatcatgatccatggtaatttacccgtcataatcccagatgttaatgtagcaattaagttcgcttgtggcaacccaaaggctggtgttgcactatctgtaacgaattgtggtgataagatgctgattgtgccgacagttacgattacgccgacaatcccggcaatcatgaaatatttcatcatttcagattttgaaccaccaatgacatatgttactttttgagattgcatgtagccaccaccaacagcaacggcggtcacaacgaatgtcccgaacattaataagatttgcgtatggttattgtccgtccaaccaaataatacgaagactaccgtcataatcactaatgacgcaattgtcatccctgatacaggcaagttagaacaaccaatcgtcccagcaacccgggccgaaacaatgacaaagagtaaacttaagatggctgctagtaatgcaccaacaatccccattaagaagttttgcgcaatgataataccaataacgaagatcccaacaccaccaacaacaatggcaatcataccaagcgtattcttttcttcgcctgctacgtttttggcagctagtgttttcttgattgacgtcacgatggttgggattaatttaatcgcaccgattaaaccaccacaaagcatcattccggcaccaatgtatttaacgtatgaacttgataaatcgttaacggccatttgattcacggctaaactcgtgttattccaaacatgcgcactgttgcccgccatatctgtgaaataaccgattaacggtgcaatcgcaaagttggataaaatcgcacctgcaaacattgttaatgacacttctaatccaacgataaaaccaattcctgcaagtaatggattcacttcaacgtctaatttccatttataaaatgatgaaccaacgtagctaatcatgttgttgacgacaccaaacactgatgaagttagcatcgtaataatcccaccgataccaaagccaacacccatgtatttaagcgaatcgccaccagtatctgacgcaactaaggtttctgaaatcgccatggcttctggataaaccaacttaccatgttcttcaaccattaagtagttgtgcactaatgaggctgtccccattgaaaaaagaattgcgagcaccccaacgatgaccccttgaatgaagttgatgtggccaccaattaaaataatagctggtaaaacataaatcatcccactggcgattgattcaccaccactggacatcccttgcataatattcttgcctaaaatcccttttgatttggcaaaggcaccgactaacccagacccaataattgaacctggaatcccggctgcaacggttaaaccggccttcatcccagaataagctgttgaagcagcaaaaataatggctaaaatgctccccattattagaatcgctaagttgccgacctttttgtcgccttggttgacatacggtacatatttctcacctgaaacaccgccgtatgcggattttgaaagtttcttttgcataattgttcctcctaaaagtcgcttttatttaaggctcttatccttaccaaagatttgcatcttcaatgcaaccccggttggtgtagcagctaatccacctaaaccagtttcacgtaatgtagatggcatatcttcaccgattcgtttcatggcaccaatcacttcatcagctggaatcttgctgattagccctgccaatgccatatcagcactggtcaaggcatcgacggccccaatcacgtttcgtttaacacatggtatctcaactaatccagcaacgggatcacaaaccaatcccaatagattagacatcgccatcgcgaatgcttccgacgattgttgtggtgtgccaccagcagcttcaactgcagcggcggcgcccatcgcggcagcactccccacttcggcttggcagcctccagttgccccggcaatcatcgccttattggcaacaatcatcccaaaggctgacgcacaaaacaagaaccgaatctgcgcatcccgatcaagcgccaagcgctcagtaataacagacaaaacaccgggtaaagtacctgctgaaccagcagttggcgtcgcacaaatgattcccattgaagcattgacttcattggtagctaccgcattttgcatagcggtcaacatcacatcacctgataacgactttcccttttcccgataccgcttcaacagaaccgcttcaccacctgtaatcccagtggcagactgaacaccttcaccggtcacgcctttttcttcggccgcaatcatgacatccaagtttttccccatggttgcccaaatgacttcacgactagtgtgactcatcgcaacctcttgttcgataatcaattccgagattggtagttgccgttcttgcgctgtctcgactaattcgtgaattgttgtatacatcttcccaccactttctataacacaataacgtcttggctcattccgcggacctgttcaatctgttccgggtacggcttatcaatcagttcgattttatacaaaaaccgatctggcactttaaccgatatgcgcttatcacgatagttgccttcaaatatctggtctaaagcatcgccgatttcttgttccgattcgacaaaaaccaatggtaacgggccatccgttttaatcacaatgccattcaaattgacttggcggatttcgatggtcccgcccccaattgaacagccccaaatcgttagttccttctcacgattgattaacgttaattccgctgtattgggatggtgcaccggactattccctggatcttcaatgaagacaacgtcaataccttgacgtcgcgctaaatcaactgccattggtaccctttgatcagccggatcgaatcctagcacgccactaataattgcataatcggtaccatgcccttggtgggtttgtgcaaaagattcgtagtaacgcacaataactttgttaatcggtgcatgaaaaagacgattagcaacatgtccaatggcaactgcgccagcagtatgtgaacttgaaggaccaatcataatcggtccaatgatatcaaaaacgctccgatattgatttgtcatgttctcctcctactttctgagatagcattaacaaataggactacttatccaataaatcacaatctctatatctgtaccataacacaaaacaaacacggcttcatgatattctaataagcaactttgtgaaaaaatgagaggattcttagatttatttctaaaacgaatcccacaattagctttgcctatttaaaggttgccatcagccactttcaagattatataccctaaagcacactcattttttcgcaaggtgccgaattttattgtactacaacacaggtttttaaatccactatctttgcgtcactgttcaataactactataatggacagcacacacatttatattggaggttttactatgcggatttttgttattggcgcccatggtaacgttggccagctcctaattagccaactcgttgctgccggtcacaccgttacagccggcattcgtgtcgaacaacaggcggatgaacttgcacaactaggggccacgcctgtcttattcgatttaaccaaacaacctaaggctttagcaccactatttgccgatcatgatgcgattgtctttacagctggttctggcggtaaaacaggcgatgatcaaacactgttggttgatctcgatggcgccgttaagagtatggcagcagctaagattgctgaagttagtcgctacgtcatggtcagtgcactttttgttgaggatcgaactaaatggcctgaaagtattaaaccgtactacgctgcaaaatactatgccgatcactggcttgaattctctggtttagattggaccatcttgcgtcctgggacacttacaaacgacgaagctaccggcctagtgacaatgcaaccatctggtggacaagttgcacgtgctgatgtcgctgcgatgatttgcaccgtcttagaacatccgaccgaaacaatccacaagaaattctcgtttgttaacggcgacttgcctttaatagacgccatcaaaaaagcagactaaattagtctgcttttttcgtagtcttttttttggtggttgttttcttagtcgttgttttttgggtagctgtctttttagctgttgtcttcttggcaggcgcttttttcttagtcgttgccattttcttaggtgcggctttcttcttagcgggcgccttcttttcgactggttcttctttaggcgcctgtgaaccgattacgacggcttccaagtcctttgttagcaagtcggcaatcttcgtccaattagcagctgccgattcttcaaacgaagctaccgtcccaattaagtcaatccgcatgttcgagcgattaatgagtggcgatgtcacatataaataaagattcacctctgcttggtcgtcgagttcaaaaaattgatttacttttttaatgtattgtaatggtagattcacaatccccgtttccaatgtcaccttaacgggttcgccagcatattctgtcagcaccgaaaaagaggccaaagcttgtttttcaatggctttatcaatagcgggttttaactgtgccaaaataccgtccgccacaaaaggatctggcgtggggagctcgtattcatccgttaaatatgtttgatcttgaatttgattgataaatgcttgtacttctatcttcatctcgtcagtccttttttaaatctctacatatcatagcttatttagggctaaaatacaaaaaacatcccacctaggtgagatgttcgcttaattgcaatcattaaaagacacggcgtgcaaaacttggtgcatagtattgcattgaaccgatcttaacgttttcgccaggttgtggggcatgaatatattgtccgccaccaatgtatagcgcaacgtggtgtgagctaccttgtgaaccccagaataataaatcgccaggttgcaagttgcttaatgaaacagcataaccggcactttcttgagggactgtccaaccaccgatactcttaccagcagcatttctgaagacatagtccattaatccagaacagtcaaaactacttggaccatgggcaccccaaacgtaaggtttaccaatttgagccatcgctaaattaataacagcttgcgcattaccagtcgttgctgcaggtgccgttggggctggtgttggtgtcgttacaactggtgccttttgagttggggctggtgttgtttcaactggtgcagtttcttggacaggagctgatgattcttgagtagctggttgttgtgtttgagttgtactttctgcttgagcaggcgcactactttctgctacagctggtgtactttctagtgtggcaggcgtttcaactggtgttgattcactttctgcgacaggtgctggtgttgtaggcgtgctttctgtttgcgctggtgttgttgcaactggtgctggcgcagctggtgtttcgacaggagtcgctgttgcaggttgtgctggtgctaccggttgtgcaacgggcgctggtgtggcttcaatcttaccatcacctgtaaagcgagctggtacccagctgccattttcaagttgataccattcttcgccagaaacagtttctgttttcacaacgttgacggtttgaccataacctaagtattggcctgttggggctgtataagttgctgttgaccaaacagttgttgcgccaccggcataggcaatccgagctgtcttttgagcagcaggtgcttctgttgctggtgttgtttcagctggtgtagcgtcactggttgttaagtaacgttcaggtacccattcgccgttcccaattcggtaccatgtttcagcaccaatcttttgtgatgctaaaagatttactgattggcccttaaagatgtatcgtttagcagtttgaccagttgttggacttgtccaaacagttgttgcaccatctgcgtagttgacggttgctgtcgttgctgcttgtacttgccctgcactcaataaaccgatcccagctgcccctaaaattccagaactcaatgcaatcaaactctttgtgttgttcattaaactgtctcctgtcgataaattttttatttgtgttttcttaatcatcgtaattaattcataactaactttgcaaaaatttaatttctaaatgcaattttagcacagacccgagtaaacattcaagtaaacactatgaacaactgtttaagcatgcaacaaaaaaagcgccactacacggtttgtgcggtgtcacttttttttaattaatgggcaacattgccggccacattcagtgcatcccacgttcttgcaaacggtggtgcataaacaaggtcgagtaacccgagttgttcagttgtcatcttcgcttggatcgcagttgcgagtacatcaacgcgcaacactgcgtctttttgaccaaccacctggccaccaattaagatatgctctgctttggtgtaaatcaatttaatcgttaaatctgattggcctggataataattcgtttggttcttgtcgtggattaaaacagtactgaaatcaataccagcctctgccgcttctttttcagtcaaacctgttcggcccgcttctagcgtgattaatttcacaccggctgaattcaacatccctggtaattgagcggcttgcccgcctaaattcgtgccgacaattcggcctaatttattggcaccagtggcaagtgctgaatacatcggttggttcgtcacgctgttaatgaccgttgcattatcgccagcggcatagacattttcaatcgatgtccgccctgcttgatcgacaataatcgcaccatttggcaacttcttcaatcgatcatccgtgatgaattgcgtattaggccgaatcccagctgctacaatcactaagtctgtcgcatactgccccttatcagtcacaatgccagtcacctgaacagttccttctaaggcttgaacagcttctgataagtgtaattcaatgccgttatcacataagtcatccgcgaacatgtccgttagttctggatcaaaagccagtggtaaaattcggtcttctagttgaatgacccggacttgcttccctaattgatggaactcttcggcaatttctaacccgataaagcccgcaccaatcaccgttacagattgaacctttgggtcttgtcctaattcacgtaaggcttgtccatctgccatcgtccgtagatgatagacgttttttagatcaacatttttaatcggtggcatcacagctgtggctcccgttgctaacattaattgatcataagattctgtgcgatcttgattggttttcaaatcccgaaccacgattgtttgcgcatcaaagtcaactgatagtacttcgtgttcaagcgcaatatcaataccttgttgagcaaatttttcaggtgtccgggcaatcatttggttgggatcttcaaagtgctcgccaacaaaataaggtaagccacaagccccaaaggacacatagtcccgtttttcgtataacgtaatgtctaaatctggattcgttctttttgctttcgcagctgcacttgttccggcagctgtggcaccgataataatcgttcgcatcactaaaccctccatttttttgaaattaagccatttcgtctgaatcttccgtcaaactcatatcattaaacttgttcttatccagtttacctaataagtgagccgttaaaaccccggcagtcattgagccatcaacgttcaaggctgtccgacccatatcgattaatggttcaactgagattaatagtccggctaacccgactggtaagttcattgaagaaagcacgattaaagcggcaaatgttgcgccaccaccgacaccagcaaccccaaaggaactgattgcaacaatcaagattaatttaaccaagaaaccgatgctccaaggattaatcccaacagttggtgcaatcatcacagctaacattgctggataaacacccgcacagccgttttgaccgattgaagccccaaatgaagccgataagttagcaatcccatcttcaacccctaaacgtttcgtttgggtttcaatgttcattggaattgaacccgcactcgtccgtgacgtaaacgcaaaaattaacgttggaatcacttttttaatgtagttgattggatttaacccagtgaacgtgattaataggaagtgaatcaagaacatgatgattaatgccacgtaagaggcaatcacgaactcacctagactgagaattcctttaacattagtttgtgctacggtcgttgtcattaaggctaacaccccataaggtgtcatccgtaaaattaaagttaccatgcgcatgataaccgtgtacaaggcgttaacgattttattaaacatttctgcttgttccggctttttacgccgtaattgtaatgctgccactcctaagaaagctgagaaaatcacaacagctaatgttgatgtaggtcgtgaacccgtcatatccatgaatggattttcaggaatgaagctaacgattttttcaggaacagtttgttcctgtacatcgcctagcttcgtttgtaattctttcgagcgcgccttttcgacttggcctgattgaatatcactcgcatttaagccgaaaacatccgctgtcactgaaccaactgtggctgcgattaaggttgtaaagactaagattccaatgaccatgccggccatcttccctaagcccttagatgattccaagttcgtaatggcttgaataatcgaaaccatgactaacggcataacgatcatctttaagaacgagacataaccgttgccgacaatgccgacccaatcagctgtttgtttgacaaccgttgaatctgctttgaagataatctgtaagagtgcgccgaataaaatcccgacccccaatgccgtgaaaacgcggcgactaaacttaacgtgaatccgggccatcttgtttaaaacaaataacatgatgagcatgatcacgatgttgatgacgacatatgtaattgtcatttctttaccccattccatttttaatacttacttattgtaaacgatagtgattatttttgcattagataagccctaattctcataatttatttcataatggtaattgcctaatgttaactcacgataaaataacagttttatttcagaaaaatgggttattaataatgcatgggcttctttcaacaaaaaaaggcgcagacaaaatcaatttgcctgcgtcgctattcatgattatgctaggtcatccccattggtggcgattaccttttggaaccaatagaaagagtccttcttagaacgagctaacgtccccgttccgtcgtcatttttatcaacatagataaacccataccgcttcgacatttgtccggtgcctgctgaaactaaatcgatacagccccatggcgtatagcccatcaaatcaacaccgtcatcttccacggcttttttcatctgaacaatgtggtcgcgtaaataatcaatccgataaggatcgtgaatttggccgtctgcttcaacgtgatcaacagcaccaaacccattttccacgataaattctggtaagtgatagtgatcattgaaccagttcattacataacgtaggccaactggatcaacttgccagccccattccgatgccttgacatatggattaggcactaaatcgtgttcttcatcataatgaagtgttgtttcacctttgtccttggttgcaaatgacatgtagtaactgaagccgatgtaatcaactgtccctgcagccaattctttcaaatcatctgcggtaatgtccaaatcgtagtgttggttcttttgatattgtaagagccattctgggtagcgcccatgacagtgtacgtcagcaaaccaataacgggtttgcattgcgcgttctgccttgagcacatcctctggtttagctgtcagtggatagatgggacacatcgcaatcatgcagccgatttcgaaatcaggattgatttgcttgccaatttgtacagcttttgcactcgcgactaattcgtagtgggcggcttgatacatcactttttcagcatcttcaccaggttgaatctgtaacccagaatttgtaaataaggcaaactggctgtggtaattggcttgattattaatttcattgaacgtcatccagtacttcactttattacgataccgtttgaagaccgtttcagcaaagttcaagaaaaagtcgatgactttgcgattacgccaaccaccgtattccgtgaccaagtgatatggcatttcaaaatgcaagagcgttacaactggttgaatatgatatttgagacattcgtcaaataggtcatcatagaatttaaggccggcttcgttggggttgtgcttcatccccattcgaaagaatccgcgtccatgcaatggatgttctaaagctcttgaaccccatttcggcaaataacttaatatcttctggataacgatgatagaaatcaatgacttcgtggttcggataattgtgccccggttgtacaccatctgtaatcccccgttgatgattaacatccccggcagtcatcacatcaacactaatccctttgccatccgcttgccaagcgccttccaattgatgagcagccactgcgccgccccataaaaaatcttttctaagttgtcccatgttgacctttccccctatttagttgttgcaccttgttctgaagcatagttcaagtgatcttgtttccgaataaatggtaagtacgtaaagaacgtcattaataacattaaggcttgccacaatgcagtcttccaaccacccactaataacccagaaatgattggtggtgtcgtccatggtaccaacgttccggggaacattgggattaaaccgacccgaatcgcagtccacgttaagattgctgatagcattggtgtcacgaagaatggcaccatcataatcgggttcatcacgattggtgtagcaaataaaatcggttcattaatattaaagactgctggtgctaatgataatttccctaaatttttgaattgtgctgatttggcaaagaatgccatgtaaacaacaatcccaattgtcatcccagcaccggtaactgtcataaattgatcaagtaattgttgcgtcacaatgtaaccaccgttagctaacgttaatgctttgcctgaacccaagattttttggttagccagtgagttggcttgcaataaaggccccataatcccaccaacaattgttgaaccatgcaccccgaagaaccacaagaatggtactaagaaagaaatggctaacatgccaccaaatgaatcggtaattccttgaagtggtgcttgaatggtattgtaaattgattctgttaaggttgagtttgcaaccttgtcgaagaagatataaaccaagagtgagccactaattaaaacagcagctggaatcaaagcggtaaaggaacctgcaacgttcgcaggcacttgttctggtaatttaatccgaatatcatgttttaagaaagctgagtaaatccaaccgactagtaaaccgacaataatggcagtaatcatcccttgtccaccaagccaagtccgatcaataaacccggtttgttgactcatcattttaacagagacaacaatcttaccggatgccgaaacaatggcagtgcttgggcgcgtcactaataagaaagaaacaaacaatagcaagtaatgaggctggaaacggatcaaaaccttcatcctgaacccaagaataagcaatccccgcaacggcgattaacgccataattgcaaacgatgcgttataggcaacgttccaatatggggtcaaaccagttgaaaccatccaatcggcccaactcttaacaggcaagttggctaaaattaagaaaatcgatccaacgattgtaaatggcatcacgtatagcatcccatttttcaacgctgtaatcggccgcgtcgcaacaaacttcataataggtggcattaatttagtattaatccaagtattcatgtgtttaacttcccttcgctatttaatcacggcgattgatcaacatcaccgcctcagaatgcgcttccataattgcagtatagcgctttgccatctgggcgactagtcctttaacggtgataaacacatgcaccactgattggtatttgtttcttaaaaataacatgtttcaaacaacacttactgaacgcaagcaacccgatgtgctagcaactctagaatataaaccaccggtatctgcgtcgtattattcaaggaaccattcttttcttcaggcatataatacggaatcacaacgtccgctaaccgcgctaaagtcgaatgcgtactgttggtaattgccaatactttgccttttcctgcttgatattgctcaacttgtgccagcatttcagttgtttcccccgacaccgagagcaccactaataaggtatccgccacgactgtttctcgcatccccaccggtgtaaatggatcattgatgctcagcgagaaaataccagcgttggcaagataacgcgaaccatactgagccagggcaccactagtgccgatcccaaagaaaaagacagcttgtacctctaaaattaatgccgttgcttgtgataaaagctgtctgaacgtttcgttattcgttttatccaaaaactcggtaattggcaacatgacatcatattcaggcatcgatgtctttttttgcgccaaccgctcttgctttagcatatacttgaattccgaaaacccctcgaccctagcttctcacaaaaccgcgagattgttgacgtcgatacatgcgctcgggtcgccaactgacgaatcgtcattttttcgacctgtgcgcgatgatttaaaacatactttaaaactgatagctccaatgtattcaactgctggattttttcaagttcaaacatttactaaccgccccttgctaccattctatcaatctttacagattatagcgccttttaagggattaaaaaaaggattcgctgctcgccaatccttttttggatgatcactacatctttcgaaccacttcatccttaatcgttatgccttctttttccaaccgtgcaatagtgtctgcaaactgaggtaagtaagccttatgcgcaatcagtagttcatgcatgacgcgcgttgcggtttcaccggatggcaccaatggatggctaataaaggcttgtaaagctgtgccataatcacccgttatcgcagcttcaatggttaacaattccattgatttcatcatctgtaaccaaccacgttctgctgttggcaatggtccaaacgcaacattccgcgcaccagccccaccaacataggccgtcacttcaaccgcacaatccgctggcaaatcagggactgccccgttatttcgcgttgaaaccacaatttctgtattcttattcgcatagatcgacgcaatcgtttcacaggctgcatctgaataataagcacccccacgttgttcaagttgtttaggtttgtaatctaaatcagggtctttatacaactcgaacaattcgtattcaatgactttcacctgctgcgcatgcgtaccttcagtcgcatattctgttaaaccatgctttaacatttcttcagcacgatagtaataacgatgatagccacacgggatcatgttcatttgctgtaactgttcccgatagaaaggaacatcaaaaatatttttcggtaacccgctattttcttcatataatttatcaatcaattgcggcgttaaatcatgaccttttttatcggctactttatgccagtgaaagtgattaacccctgcaaatttatagattaaatccgtctgtggcacacctaacgtttcagcctctcccatcttagcggcgaccggcacattacacaaacaatcaccttttcccattaaccgtatcttaaaactgcctcggtaaccatgccacttgggttagtaaaattaattaaccatgcgtcaggacagaggcgcttcatatctgcaacaatttctaaaataacgggaatggttcgaaatgctttaaacatcccaccagcgccattagtttcttgccccaatagaccgtatgaaaatggaatgcgttcgtccttcacccgtgcatccagttggccgacacgaaattgcgtggtcacaaaatcggcgtctttaagcgcttcttcacgattcaaggtcgtatgaatctgaacatcatacggggacgcatcccacattcgttgcgccatttttccgacaatcgcctgcttcaacatctactaaccagatttcaccaattggtaattccgcatagcgcttaataaacccctccatcaattctggcgtgtaactactaccgccaccaatcgttgcaatttttactttccgtgtcatctgaatgcctcctttgatttgtttacaaattaagcatacctaacgcaaaccgcaaaccccacctctatgccctcgtttaaaagtgagttcgcataaactgccgatattaatggcctaaacgcgaatttaatttacaaatcactagggtatcgattgacttattttacaaatatcgctaatcttttgtaaaaggaggcggttacatgttaattaaagaaaaactagagacattcgcgttttcccccgctgaaaccgtggttgtggattacttgttaacggctccagaagcactcgatcagctttccatccaagaaattgctgctcaaacctatacgcaaccgtccactctggtccgcattgccaaaaaactccattttgacggttggaaatcttttaagaaacactatctagaagagtggcgctacctcaataaacattttacgcgtatcgatcccaatctgcccttttcgagtacggatagtttgatgactatttgtaagaaaatggcggtcttggacaaaatgacgattgatgatatcttctttttactcgaccacgaccatctgagtcaagctaaatcattgctcctcaaggcaaatcatattcaaatcttctcccaaaactcaaacttactcatcgcgcaagattttgccctcaaaatgaatcgtatccaaaaaaacgttacgctatctgcggttcgtggcgaggaaaactacgatgcctataatcttagtccggatgcttgtgcgattttaatttcctattctggcgagaatcccaacttactagcacttaacactattttacgcgcccgcaacatcccgacgattgcgattaccagtatcggtgaaaatcgactttcgcaagaatgcacttgctttttaccgattacaacccgcgaaaaactctactcgaaaatcggcaactttaccattaatacctccatcatcttcctattaaatgttttatacgcgctcgttttttcggaacactacgatgcacatctcaaacatctaaaacggattggtgaattagtcgaccatcgcaccatcagtaacgctgtcatgcaagaaaatgaacgcacaaaaaaaagccccttcctgacggaaggggctttttttacagtattccgaagaataaacaccttgtgctccacaacacagcgggcgaaaacacccttgcaatacggcaagtggttaaatgaataaccgtggtatcctgtatctttgggtctcctagctgccttcgcagaatagttgcctaccgagacttactcgactcatcgcataaccttattatagcatactttttagtgacgcgatacccatttcggcgtaatcgctcgtttgcgtgttatatcggctaaaatttgcgctaacataaagccaacggcaatcgcaccagcaatcatgatcactgcaacaccttgtgtcgaagcttcatttaagttgcctagcacgaggtttcgaatcgcacgatacgcagttccgccgggcactaagggcactaaccctggaatattaaagataatcaccggcatccgcttataacgggccataatattgccacaaatcccaacagctaacgcacccaacaaattagcaagcatccgcccgctaccaaagttaaagagcatccaatagacctgccaccctgccataccggcaaagccacaccataataatgcgcgtcttggtaaattaatacaaattccaaacgcaaccgttgaaatataactaaataacgcttgaataataaactgaacccaatatggcatctgatgaacctctctttacataaagaatctaaatacgagcgcaatccccgttccaattgcaaaggcactcaggatggcctccatcccacgtgccataccagataataaatgccctgctagcaaatctcgaatcgaattggtaatcgctacaccaggtaccaatggcattacagccccaatgataatattatcgatatcgactcctaagtgccacctagttaatagataggcgactatcccaatcactgtcgcacttaaaaattcaccgataaagcgaatcgttgtgacccgattgaccgccgcaaaggcggcatagcctaaagcaccggctaccgctgacggtatgatgtctaaccaatcatattcaccagaaaaaataatcatcaaaaacgctgaaatgactgctgcagctgtaatttgtaaccacaacggaaaatgagctgtatcctgatcaatttgttttaaccgtaacattaactgatccaacgtaatttccttagtcgcaaattgccgtgaagcagtattcacattttcaacttttccaaggttaatcgtccgcaccgcaacagcgcctagttgcacataaggttgattttcaattccgataaataaaccggtcggtgtcgtaaacacaacactcttttgaatgcctgcattataagcaatccggttcattgtatcttcaacccggtacatttcagaaccactttcaatcataatccgtcccgcaattaggcaggtttctaatattttatttttttgggcaattttcatggcaaaacctcattcgacaacttttttcattatctccatcataacttgtttaaactgaaatagaaaccatttacatattaaaaattgctcatatatcgccacaaacccgacttcttatgttagtgtaactaagaagcaacatgaatagtaattaattaaattcgttcggcgctagctacgttttcaacgggctatttttttacacttttttatttaggagggtttattaacatggttttaacaaaaaaaagaacactatggttatctgttttacttggttcactgagtgcttatggacccctactagtggatatgtatctaccagcatttccgattatggaagctgattttcattcatctgcttccatgattcaactgagtctaaccatgtgtttggctggacttgcgattggccccatcttcatgggtgcctggagcgatcgtgttggccgtaaaaagccactcgtaatcggaaccgcccttgcttttacagcgtgtctattatcgttagtcacccacaatatttggctattcttccttttacggtttattcaagggttagcgagctctgcaggacaggtcattactcgagcagtcgctaaagatttatttgacggtaaacaattgacaaaattcattgccttactcatggcaatcaacggtatcttccccatcatttcaccattaataggaagtgctttgctccgtttcacctcttgggaaggcattttcggctttttagggattgttggccttcttctattgttaggcatcattttgggattcaaagaaacacacacagtatccacaagcgcgcaatcggcacaacaatcgcgccttggtattcaagccatttttaaagatcgcccattcatcctatttgttttaattcaaggcctcgtttatggggcaatgttctgttatatttcaggttccagtttcatgcttcaaaatgtctttagtctttctaaatcaactttcagtctaatctacggaatcaatgggattgggattatcttaatggctgaaatgtccaccattttaatccattggtttgatgaattacaacaattaaaaatcggcttaattggtggtttaatcggtgccatctgcgtcttaattagtggctttggctctaatcgtctctggttagctttaattggtttattcctagtggtcgcaacacttggtctaattaatgccgttgtcacctcactggccttacaacgccaaggacaacatgcagggattgcttcttcagtgcttggacttggcatgtatgttttcggcatttttctttccccattagttggcgtgatgggcagttatacctatcttccattagctgttttgattttactttgtgagattggcgcattaatcctttatcaacgtgttatccacatggttcgtcaataatcatctcccccttagacaatagctaagggggttattttatttctacttatcaaaaaagacccgcaactctccaatgaaagttgcgggctactattaatgcgctgattacatttcagcgattttcttatctaagtatctttttaacttctcttttggaaaagcgccagttaccttttctgtcgcctgaccatttttgaagattaatagggttggaacggattgaatcgcatattgttcagctaacgctgcttgatcctctacatcaacggttcctaagccaaactgatcagctaattgttcatgtaattcagtaatcatcggtgtcataatccgacaaggtgcacaccaatccgcccaaaagtctaaaatcactaacggttgtgtttgaacaaagcttgcgatgttctgttctgttacggtttgaatcatgctgatttctcccaacttattatttcctgaattattcatacttttcgttgcagttaaaactttgtgcaaagttactttagtgtgtaaaaaaagcagctttttgttagttttgttgtcggactgtttaaaaaaggacagacttcaccctttccctaagaaaaacattttttattttgtgagttcacagcggatatatttttagattttgaatcttgaacagtgtctgccaaaataatttatcgaacacattggtctgagataaatggacccagacttgacgtgcatggtgcgtgaccttagctgccacatggagtaatttaaaacggatcgtcccgacctgagcgtgtttaagctttgttggtaaaactaagttcttcatggcttgcagtatattataagcgaccccagctaccagcatccggaactcattggcctcaaaactagaactgtccgttttatcaaagtgaaagccacgtttaacttctttgatcaagtcttccatggaaccgcgttggtgatagagggcaaagacttgtggaccgcttaattcttccaagttggtcacgataaactcatggtcaaacagaaagttgcccgccggccgcgttgatttaataatcacacgataaggtcgtgaccaactttgaggacaatagtctcgcaggacatgccattggacttcagcttcggtgaagtcctggtcacccacttggatcaggttttcagcccgactttggagctggtagttcgcttttaaacgaatcacgaacttagcctgctttttatcacacgcatggtagatccctggagctgcgaaaccagaatctccccgcactaagacatccagggaagatccgtcataggcccgtaagctccgtaataaaaatttagtcgcaccttgggaagtatagcgattgccggggcgtaattgagcattcaacaagcagcccgataaagcatcaaaggctagtaaaggatgataaccgttggtctggtagtgaccgttataagcactcttttcttggtcaccaaacgtatcggcatgtgtcgaatctagatcaaggatcagctgatgttgatttagctgcccaagaacaaagtgagctaccgagccgagcaatgatttgactgaaaagagcccagacgctgaaatgtgattgataaagcgtgaaagtgtcggctgggaagcgaccgcttgagacaagaccagcttaaaatcaacggcgtgtgacaaggtattagccgactgatcttggcagtatcctgccagcaattgcaacagcaactgcttaaataaattgttcaagggaaaggtacaatatttacggtcatctttaaaatgcaagttatcttctaagagctggtcaaagtgaatttggtgcagaaattcagcaattaataaagttccggcatcgttcgctaactcaccaccgtcattagaaatgttgatctggtcattgaataaaagtttttcatgatgtaaagttgacataaggagcactcctgttctttgtggttttcatcgattttacaatagcacaggatgtgctctttttgtacacccaacaggtgaaaaacgaaaaagatgcgaactagcatgacaacaacaaaaagtagtccttaagggaaaagtatgaataattcaggtatttaattactacaaaaaaggttgaacctttcggctcaacctttttatatttgcgcggcaacgtcctatcctcgcaggtagtttcccaccaactactatcggcgctaagaagcttaacttctgtgttcgacatgggaacaggtgtatccttcttgctatcgccaccacactattttgtgcttgcgcactgagaagaacttcgttctctcaaaactgcataataagtaatatttcatttcaaaagcctaacattgcacctttggttaagtcctcgaccgattagtactagtccgctccatacatcgctgtacttccactcctagcctatctacctgatcatctttcaggggtcttacttccataaaggaatgggaaatctcatctcgaggggggcttcacacttagatgctttcagcgtttatcccgtccatacatagctacccagcgatgcgcctggcggcacaactggtacaccagaggtatgtccatcccggtcctctcgtactaaggacagctcctctcaaatttcctgcgcccgcgacggatagggaccgaactgtctcacgacgttctgaacccagctcgcgtaccgctttaatgggcgaacagcccaacccttgggaccgactacagccccaggatgcgatgagccgacatcgaggtgccaaacctccccgtcgatgtggactcttgggggagataagcctgttatccccagggtagcttttatccgttgagcgatggcccttccatacggaaccaccggatcactaagtccgactttcgtccctgctcgatttgtcaatctcacagtcaagctctcttatacctttacactctacgaatgatttccaaccattctgagagaacctttgagcgcctccgttacactttaggaggcgaccgccccagtcaaactgcccacctgacactgtctcccgccacgctaagtggcgcgggttagagtggtcatacagttagggtagtatcccaccaacgcctccatcgaaactagcgttccgatttctacggctcctacctatcctgtacaaactgtacaaacactcaatatcaagctacagtaaagctccatggggtctttccgtcctgtcgcgggtaacccgcatcttcacgggtattataatttcaccgagtctctcgttgagacagtgcccaaatcattacgcctttcgtgcgggtcggaacttacccgacaaggaatttcgctaccttaggaccgttatagttacggccgccgtttactggggcttcaattctgggcttcgcttacgctaactcatcctcttaaccttccagcaccgggcaggcgtcagcccctatacgtcatctttcgattttgcagagacctgtgtttttgataaacagttgtttgggcctattcactgcggctgacctgacggtcagcaccccttctcccgaagttacggggtcattttgccgagttccttaacgagagttcactcgctcaccttaggatattctcctcgaccacctgtgtcggtttacggtacgggtagtttatttctcactagaagcttttcttggcagtgtaacatcaggaacttcgctacttaatttcgctccccatcacaacttgtccttaaagaatcaagcatttcactcaactcaagacttgttgcttagacacacatttccagtcgtgcgcattccttagcttcctgcgtccctccatcgttcaaacaaaataaactagtacaggaatctcaacctgttggccatcgactacgcctttcggcctcgccttaggtcccgactaaccctgggaggacgagccttccccaggaaaccttagtcatacggtggatcagattctcactgatctttcgctactcatgccggcattctcacttctaagcgctccactagtccttacaatctagcttcatcgcccttagaacgctctcctaccgcggacacttacgtgtccacccacagtttcggtattatgtttagccccggtacattttcggcgcagcggcactcgactagtgagctattacgcactctttaaatggtggctgcttctgagccaacatcctagttgtctgtgcaccgccacatccttttccacttaacataaattttgggaccttaactggtgatctgggctgtttccctttcgactacggatcttatcactcgcagtctgactcccggaactaaatcaatggtattcggagtttatctgaattcagtaacccatgacgggcccctagtccaaacagtgctctacctccatgatccaatattccgaggctagccctaaagctatttcggagagaaccagctatctccaagttcgattggaatttcaccgctacccacacctcatccccgccattttcaactgacgtgggttcggtcctccagtgtgttttaccacaccttcaacctggacatgggtaggtcacttggtttcgggtctacatctatatactcactcgcccatttcagactcgctttcgctacggctccagcttttcactttaacctcgcatataaacgtaactcgccggttcattctacaaaaggcacgccatcactcattaacgagctttgactaattgtaggcacacggtttcaggatctatttcactccccttccggggtgcttttcacctttccctcacggtactggttcactatcggtcactagggagtatttagccttgggagatggtcctcccggattccgacggaatttcacgtgttccgccgtactcaggatccagaacggaggttaagttgtttaatctacgtggttatcacactctttgactcagcttcccagctgattcgattacaacttaacttggtaactccaatgttctgtcctacaaccccaagaagcaagcttcttggtttgggctcttccccgttcgctcgccgctacttagggaatcgatttttctttctcttcctgcaggtgcttagatgtttcagttccccgcgtctaccttcattaagctatgtattcacttaatgataatacccgactaaaggtattgggttcccccattcggaaatctccggatcaaagcttacttacagctccccgaagcatatcggtgttagtaccgtccttcatcggctcctagtgccaaggcatccaccgtgcgccctttataacttaacctaactttacctacggtaaagggttattatttgagtttagcgatatgaactaattcatatttctattaaaaaactctttaaaacgcaatgttttctcggcttttaaaactaatatattacttattatccagttttcaaagaacaaagtttgagagtagacctctcaaaactaaacaaagtttcgacttcgcaaatgtacaaggttttccgtattattccttagaaaggaggtgatccagccgcaggttctcctacggctaccttgttacgacttcaccctaatcatctgtcccaccttagacggctggctcccgaaggttacctcaccggctttgggtgttacaaactctcatggtgtgacgggcggtgtgtacaaggcccgggaacgtattcaccgcggcatgctgatccgcgattactagcgattccggcttcatgtaggcgagttgcagcctacaatccgaactgagaatggttttaagagattagctaaacctcgcggtctcgcgactcgttgtaccatccattgtagcacgtgtgtagcccaggtcataaggggcatgatgatttgacgtcgtccccaccttcctccggtttgtcaccggcagtctcactagagtgcccaactaaatgctggcaactagtaataagggttgcgctcgttgcgggacttaacccaacatctcacgacacgagctgacgacaaccatgcaccacctgtcactttgtccccgaagggaaagctctatctctagagtggtcaaaggatgtcaagacctggtaaggttcttcgcgttgcttcgaattaaaccacatgctccaccgcttgtgcgggcccccgtcaattcctttgagtttcaaccttgcggtcgtactccccaggcggagtgcttaatgcgttagctgcggcactgaagggcggaaaccctccaacacctagcactcatcgtttacggcatggactaccagggtatctaatcctgtttgctacccatgctttcgagcctcagcgtcagttacagaccagacagccgccttcgccactggtgttcttccatatatctacgcatttcaccgctacacatggagttccactgtcctcttctgcactcaagtttcccagtttccgatgcacttcttcggttgagccgaaggctttcacatcagacttaagaaaccgcctgcgctcgctttacgcccaataaatccggacaacgcttgccacctacgtattaccgcggctgctggcacgtagttagccgtggctttctggttggataccgtcactacctgatcagttactatcaaatacgttcttctccaacaacagagttttacgatccgaaaaccttcttcactcacgcggcgttgctccatcagactttcgtccattgtggaagattccctactgctgcctcccgtaggagtctgggccgtgtctcagtcccagtgtggccgattaccctctcaggtcggctatgcatcacggtcttggtgagcctttacctcaccaactaactaatgcaccgcgggtccatcctaaagtgatagccgaaaccatctttcaaccttgcaccatgcggtgctaggttttatgcggtattagcatctgtttccaaatgttatcccccactttagggcaggttacccacgtgttactcacccgtccgccactcactcaaatgttatcaatcagaagcaagcttcttcaatctaacgagagtgcgttcgacttgcatgtattaggcacgccgccagcgttcgtcctgagccaggatcaaactctcgattaaaagtttgtagctcttgttttgttgcttaatttatttgctagcgaaattgactttgcaaatatgttttgtgccccgaagggcgaccctacacatttggtttgtcgaaactttgttcagttttcaaagatctactgtattgaaacagctttttaattatatcacacaacttatcgtctgtcaacaactatttttaattaattattacttagaagttatagctccgtaagcaacatataatatattatcacgataaggtttaaataacaagcgttttttaaaatcttttttatttcgtatcgctgagtcatcaaccatacgtccctcgtcgagacaacttttatatattaccaagattaacaggcgcggtcaagctttttattaaaaaagctttgaaaagttaccagcaacgtttcatcgttaccaataacccttcaaagctctacggtatccctattgtttaatgagtgattcaacatccaaaatcttatcaatccagtcaccttgatagaagtcttcttcatgagtaacaaggagtacgccaccctcgaaggcttggattgcttttcgtagtgcattcttcgtatcatcatctaaatggttcgttggttcatctaatagaagaaagttgcttgatgttaatagtagttcggcaatcttcaccttcgattgttcgccaccactaagttgtttcaaaggcttcatcgcttcttcggcagttaaaccagtccgcgataaaacttggcgtagttccttttgtttctgatcagggtattcgccttgtagatactgtaatggcgttaccatattattcggccacttcaagtcttgtttaaagtaaccaaacttcaccgtactggcaatctcaaagtccccatcgattgctggaatttctttaatgatcgttttaatcaacgttgatttcccaatcccattaaaacctttcaagaccaccttctgatcacgaccaattgaaaagttcaacgctggtagtaacgcgcgatcgtaaccaatctccaaatcattagtcgtcaatagaatctgactggccgttgcatgatatggaaagcggaagttagccttcacgcgattacttggtggcgtcaaaatatccatatgtgccaattgtttctcacgactcttggcaattgtcgaacgggagcccgctttatacttgcggatataagctttcgttttttcaatcttcttttgttggttctcataggcctttaaataactagccttattctcttccttttgccggaaggcttgttgtagtgtgccggtatacttcgtaatcttaccgaattcgatatcggcgatacaggttgtcacccgttccaaaaagtcataatcatgggagattgtgataaaggcgccttcgaaatgattgagataatcactcagccaatcaatgtggttcgtgtccaaatagttcgttggttcatccagtaataacatatcgggttcttctaatagtagtttcgctaaaataatcttcgaacgttgccccccacttagttgtgatacatcatgatccatccctaatgcatcaatccccaagccagtggcgacttgcataacgcgtgtatcaatatcatagaagctttttgcctctaatagttcttgaatcgcacccgctttttcgagcaattggtcatcaaggctctctgcatagtccgcataatattgactcattaatttttctttcttatataaatccgcaaaagccgtcttcaaaaattcaaagatcgataatcctggtgctaacttcgcatactgatcgagataaccaatcttcaaattcttttgccacgtcacttttccttcatccggaagaatgacgcccgtgaggatattgattaacgtactcttacccaccccgttttggccggtaatccccatatgttcgcctttattcacttgaaacccggcgtcgtcataaagttgtttatctaaaaactgttgtgttaggccttcgacttttaaaatactcattgttttattcctactttctttccaaataaaaaacaggggcagcatccgctacccctgtcatgattacaatcattgactatcgaccactccatccatagtcactacccaaataaaccactgtcaccagtcgttaaatccagtaatgtcctatagatgacttttaatcaatattaggctctgcacgatgcgtcatcttcaaatatacagagcgaagcttcataattaatggtcgttcaattaacatgtaatcgcacccttcaataagttagtcctatcctaacatagaacaatcgttcatgcaaaagccttagctaacccgtgcacgcaacttcgctaacagctgtgcgcgtttgcgccgagaaatgattagacgcaattcaccgcggacaattggataatccttagccctaccatgcatcattgtcgctaagtcttggcttgttaatccttgattagccacttcaattttgatcatttctgctaaatacgtactatagaatgcattaaacccgacatataagcctagtactgcactgattagaatcgcaagccataaattgaaattcaaaatcgtctttaaaactaacatgccacaaataaacgcaatgaccgtggccactatccctaatatgattgtatgtcttggggcgtctttcatctgctccaccttcttaataatgattaatcgtttatatttccctgaattattcatacttttcccttaaggactactttttgttgttgtcatgctagttcgcatctttttcgtttttcacctgttgggtgtacaaaaagagcacatcctgtgctattgtaaaatcgatgaaaaccacaaagaacaggagtgctccttatgtcaactttacatcatgaaaaacttttattcaatgaccagatcaacatttctaatgacggtggtgagttagcgaacgatgccggaactttattaattgctgaatttctgcaccaaattcactttgaccagctcttagaagataacttgcattttaaagatgaccgtaaatattgtacctttcccttgaacaatttatttaagcagttgctgttgcaattgctggcaggatactgccaagatcagtcggctaataccttgtcacacgccgttgattttaagctggtcttgtctcaagcggtcgcttcccagccgacactttcacgctttatcaatcacatttcagcgtctgggctcttttcagtcaaatcattgctcggctcggtagctcactttgttcttgggcagctaaatcaacatcagctgatccttgatctagattcgacacatgccgatacgtttggtgaccaagaaaagagtgcttataacggtcactaccagaccaacggttatcatcctttactagcctttgatgctttatcgggctgcttgttgaatgctcaattacgccccggcaatcgctatacttcccaaggtgcgactaaatttttattacggagcttacgggcctatgacggatcttccctggatgtcttagtgcggggagattctggtttcgcagctccagggatctaccatgcgtgtgataaaaagcaggctaagttcgtgattcgtttaaaagcgaactaccagctccaaagtcgggctgaaaacctgatccaagtgggtgaccaggacttcaccgaagctgaagtccaatggcatgtcctgcgagactattgtcctcaaagttggtcacgaccttatcgtgtgattattaaatcaacgcggccggcgggcaactttctgtttgaccatgagtttatcgtgaccaacttggaagaattaagcggtccacaagtctttgccctctatcaccaacgcggttccatggaagacttgatcaaagaagttaaacgtggctttcactttgataaaacggacagttctagttttgaggccaatgagttccggatgctggtagctggggtcgcttataatatactgcaagccatgaagaacttagttttaccaacaaagcttaaacacgctcaggtcgggacgatccgttttaaattactccatgtggcagctaaggtcacgcaccatgcgcgtcaagtctgggtccatttatctcagaccaatgtgttcgataaattattttggcagacactgttcaagattcaaaatctaaaaatatatccgctgtgaactcacaaaataaaaaatgtttttcttagggaaagggtgaagtctgtccttttttaaacagtccgacaacaaaactaacaaaaagctgctttttttacacactaaagtaactttgcacaaagttttaactgcaacgaaaagtatgaataattcaggatttcatttatattatacctaattttagccgcaataagcagtaaaatcacttaattcttcaaattaaaaaccgctaacgtcaagcgagacagtcaaccacgtttactagaatgagaggctatgtattgtaaaaattgtgtatatattgtaaatttttctgtttttatccccgtaaacagtctagaattgtagtagtgcttttttgaataatataactatattaagaaggataattgaatctatatgaaaaacattgctttgaacatccgagattttttcttagatgacaaactactcttagccgctgccatcgcagccattgtcacctcatttttcaaccgcccacaacttagttacgttaatttccacgtgatcgtcagcgtcttttgtattatgacgctcgttcaagtttatcaacggctccacgtgcttgattacttcgctcgcgagttaattatcaaaagccgttccaaacgagccttgatgcagatgttattagcactaacgtttgtcggcgcgatgttcttaaccaacgatatgacggtattaacgttcgtcccgttattcatcttaattgcgcgtcaacttgaattttcaccaatcttaccggtgacgctcatcacgatttcggctaacctcggttcttcattaacaccgtttgggagcccgcataatattttccttgtttcgttttaccatatgacgattcgccatttcttcgaatattcaattcccgtcttgattgtcagcgtcattatgttggcagcaacgaccttcctctttccaaaagaacccatcaaacttcacgggttacatcccgttgaagttgaaaaagggccactgtggtatttcgttccattaacggttgtcgttttcctcgcagtgttctcattaattccattatgggtgacaccaattctagtgattatcgcgattctagcgtttgatcctaagttattcaaaacagtcgattacggcttattactcacattcttctgtttcttcatcgctgttgggaatttaagtcacatcccaacgattgccacattcatgcgatcaattgtcggaacagcaaaacaaacctacatcaccgggattatcagttgtcaattgattgcaaatgtcccaactgaaattttactttcaagcttcactaaccacagccacgcaatgttcttagccatcaatatcggtggggtcggcacaatgtttgcctcacttgcaaacttgattgcttacaaacgatttaagaaaggctggggcaaagaccttggtaagttccttgtcgttttcactggcatgaacttcttattcttaatcattttaggggtattcggctattttctcatctaattcttaaaaacagggcaactatctttacgatagttgccctgttttttgtcattttaacagtaatcgtcatgatagcattcccattcgcgtcttactgccgatcaacgccatcgtgacgccctttaattaagttcctaaattttacaaacatatgactaacatgacaaattaccccatttctgtaaagaaactgctatttaattgacatgcagcattgatatactctcctagttccaaaacttacctaggagtgacgctttattatcaaaaacaaaccattcttgttagctatcggccttatattgctgatgctaattacaacgaatatcgcgcgtgccgcattaaccaatgaagcagcaccagaaacgaaccaccctgtccaaaagctgatgtcatctaaagccattgaacaattcacggggcaacctgcccaagcagctgaaacgtcactggtcaaacacgcaactgttctaccaacagacaaacccgttagctgtccgattcatccagatcctgattccgcagaaattaaggaaccaacgcccgcccctgagccagaaccagttgcggccccagcacctgccgaaccaaccttaattgacaaagggacattcaaattaaccttttacgatcccgcggtccttggcgcaacaagtatgcccggtggaatgtacgccggagtcgctgcgcacttgggcgttatcccccgcggctcacaaatcaagatcacattaagtaccggtgaagtatggtaccgtgttgtcaacgataccggaaccttcgccgcttctaactcacaacaattagacgtcgcaatgccaaattgtgacatcccctctgccggtgtcttaaatgccaacgtgcagattgtccaacttgcttaattaaaaaaagccaaccattcagatattacctggatgattggctttttttgatgttcaatttagaaataatcccataacatcggtttcgtatgactaaacgcagcactgagttgagcgatttgctgcggtgtcccttgcacatgcccaaagtgtgcttgactctcaagtgtgcgataccccaacatcgccttagttagattttgaatcgtaacggtgatgtctgcggtccccgttgctaattttgtcacagcagcatgtcctgcatgaatacttaactgccataaaccggcattttcaggtaagaaatcatcttgaaccgcaatcgttaccgcagatagttccgctacttgataggcataacgcgcgaagaaatcagctagtgacacaatccgtgccatcatataagggacggttgtcgtctttacgattgtgggatcaggcaataaatcagctagcgactcagtcagtgcactctcatactgaattgtcgcataagctgactgatgcttaagaataaagctcaatagctgttcttgacttgcaactgtcgaggtcatcagttcttgaatcacaaacgtctctggttggcgcgtataaatcatataccccgcaacccgtcctgtatcttctcaatagaccgccacttcccaatcactatgcttcataacatcatattgccaccaccaatcagtccgctgcacaccaccgacttgattgtccggatgctgattgaagaacgcatcaatcaacggcaccgcttgcgccaatgtcatccgtactacttatcctgcactcggtgcaaatttcaatcgtggtaagtcagccgtttgaatctcaaagtgcgtctgatcaaaagtttgttcatagccaaaccgacgatagaagccgtatgaaaatggcgcgagatacgaaagcgtcacaccttctgcacgcatgtgttcaaacgcgagttgcatcaatgctgcaatcccacctttgcccgcaaactcggggtaactcgcgacataaccaatgccactcatcttaaaggtttgcccattgagccgtacgtcaaacggcgtcgctaataagccacttgccaaccggccgtcatcaaaaacgccaaaccctgcactatgtgtatacaactgtttgaagaattcttggcgcttagcactatccggtttattaaacgcatattgtgctaattcataaaatgctggttcatctgttccaattaactttcttttttcaaccactgcacattcctcctgccatcacttatctttcactataagtgagcgagcaacaagatgcaagcgccgcctttgtgattagaccgctttttatgcataaaaaaaacgaccttttcttgggagtggtcgtttttttatagggagaaatctatgggtattagggagttatttcgttaacgaaattgcacgaagttgttgtgaattcactagaattcgttgcatcaacttgtgaaccgtaaaacgatcagttggtgcatagttcaagattaagatatgcacagtttcttcacatttctcaataaccttaccgatctacgtcgcagacataatttcgtttgattggccgcgaattaaatcacctacttgaatcgccatgtccagttcacctcgttaatttatttaaccatgacctcattataacgaaaccgctttataaaatcaattatttacttattgtcataattagtaaatatttatgattagtcaagcagcttgcctatttttgaatcttgcgatagtcagcatcgaaataccggccttcttgaatatcttcaatcataccttcataaggtgcttcgctaattacgtcttcgttattttgtcctgcatcacccatataagtaattgtggcaaattcaggcactaacatcttaggatatgtttcatatttttcacgtgattcttccatgagtgcaatgtgatcattttggtaggtcactgtgatttctggatgttcttcaacccatttagggaagaaaatcatgccgtgtaacttgttttcgtttggcatgaagtccaacgcaacatcagtcccagttggttctgtccaagtaatcttgaagacgccgtccgttaacttaacgatgttggcttcttgatcacgaacccaacgacctgcaaccatcccaccatgaattcggtagtcaactgtgtggtcgttctttgcataccattcatacttccacccattatcgtaagtgtaaatgaaatatgtccctaagaaatcttctaattctttaaattgttttgtccttttaaaagccttcatataatgtaattaaatacatgtttttcttaacgtgataagtgtactgctcaatcctttttttgtcaactttaaaaaagggcaaaaaaaaatcgccagcaaatagctgacgatttttcttaattgatttcagttgctaattggcgtttcaccgcgtgtttaagaatcagcggtgccaaaacagtggtaatgataatcacgaaaataatctctgagtaataaagttcactcaacaatttagcgttgtacccaatctgcgcgataattaacgccatctcgccccgcgaaatcattgccgcaccaattgtataggctccttgtggcgaattattcatccaacgcgcaccgagaccacttccaattaacttcgagaaaacagctaacacggttaaaatcgtaataaatagaatatgttgattcaagcttgctaagttcatcgataaaccgatgctgacaaagaataccggaataaatacggtatacccaatcggttcaatatggcgattaatctcttccttatacggggtttgcgaaatcgcaatccctgcgaaaaacgcgcccactaccgcactcaattcaacggcctcagcgaaccaaacaaatccaaaacaaatgattaacgatgtaatggcgctcgcatatggtactaacaaacgacgactcaaatgcataacaaatggcacaatccatttcacactaaagtagaccgcaaccatgaataaagcttgcagcaataaactcaaccccaaactcatgtgggttgaactagctgcagccagttgcgccccaaaaagactggtcaagacactcaagataattacggccagtaagtcatccactaccgcagcacctagtataatcgtcccttctttactttctaacacgtttaattcacgtaaaacttcgactgaaatcgatactgaggtggctgcaaaaatcaccccgatgaataaactctcaagttgactaataccaaaggccaagctcatcccatacatactgatcaccgggacaatcacccctaagacggcgaccactaaacttggtttgaaatacttcttcaacaaggtcaggttactctccaagccagcgatgaacatcaataatacgacaccaatttcggaaaacgtgtggataaaagaattttcatgtaagacaccgaacaacgcgggtccaagaataatccctaccaggagttgcccaatcacagctggcattccaatccgtttgctcatgtgtcctgccaataaagtactgattaaaataattgctaaagttgccattgattcatttccctccataaaaaaagcacgccaaaattcccttctaccaccctaaagaaggaaatcttgaacgcgcaatgcttcaaccgtttttttaacttatgtaataatactaccacaaagccgcactgggcgcaaagtttaaacgttgaattggtaatagtattcattagattgacatcgctactttttcctgataattttagagtaataactaactggaggtgagtatttttggatgacggctcggacgaagcgttttgtttaattcatcagattattccttattatcggcaagaataacgatcacgaacgaccgcattttgactttcgataattaaaaggagcttaccatgactaaaacacacgcttatcaacaaacattagacgaactgcaaaccaattatgcccaccaagattttgaacaggggctttcgcaaacagaagcggctaaccgcttagcaaccaatggtccgaataaactcgagagccatcacaccccgaagtggcaacttttcgtgcgccaattcaacaacttaatcatctacatcctaatcgtcgcagccctattaacactcatgatgggtcactattcggatgccatcatcatcggtctagtagtcatcattaatgccatcattggttattatcaagaagcgaacgcatctgatgctttggaacgaatcaaagaaatgttggcaaccgaagcaaccgtttatcgtgacggtcagcggatcgacatcccaactgaagacttagtggtcggcgacgttatcttcctagaagctggcgatagtgtaccagcggatttacgaatcgttgatgccgataatctgcgtattcaagaatcagccttaaccggggaagcagactcagttgaaaaaattgcaacacgcttaaccgaagaagaagttgcccttgccgatcaagtcaacatggcctttgcctccacttccgtcactaacgggagcggcttaggcgtggtcgtcgcaaccgccgctgataccgaaatcgggcaaatctcagttgctgtcaccgaaacgaaaacccgcccaaccccattgactcgcgaaatcaacggcttagggaccggcgtttcatttgtcgtcatcggtgcggccgtctttttattcctcttcggcttacttggcgaacattactcactctcagtattagcaatcgcgattgtcacgatggtggtcggttcaattcctgaaggattacccgcaacaatgtccgtaatcctcgcaatgggggtcagcgacatggccaagcacaaacacgccatcgtcaagagcttacctgccgttgaaacgttgggctccgtcgacgtgattgcgaccgacaaaacggggacgctaactaaaaacgaaatgaccgtgaccgaaattatcaccgccgaaacgacttaccaagtcagcgggaatggctatgcgcccgaaggtcagattttattaaatgaccaacctgctgaattggataccaccctcacacaattcttagaggctagttatgaagccaacgatacgacgctttatcaagccgacaatggttggaccattaacggtgaaccaactgacggtgcctttttaaccttatatcataaggttcatggtatcgacgacttaccaacaaatacagaaattgacatgttacctttcgattcggattaccgctacattgctaaactcgtgcaactaactgatggtacgcaccgaatctatatcaaagggtctccagataaattattcccaatggcccaacaggcaatggtcgatttcccaatcgatgactggaatgccgatgtgacccgtttatcagaacaaggcaaacgggttgtggcggtcggttatctcgacgtgccaacaacgactgctacaattacccatgaacaactccaacaagggattcaactcttaggggttgccgggattatcgatccgccacgcgatgaagtcatccaagcgctcgccgaaatgaacgctgctggggtcgatgtcaagatgattaccggtgaccatccactgacggctaaagcaattggtgaaaagttaggcttagcaccaacgattaatgcgattaccgggccggaatgggatcgcttgtcggacgctgaaaaaccaaaagccgctttagaacaccaagtctttgcccgcaccacaccacataacaaactcgaaattgtcgaagccttacaagccagtcgcaaagtcaccgcaatgaccggtgacggtgtcaatgatgcgcccgcattgaagcgcgctgacatcggggttgccatgggaattaaaggaaccgatgttgccaaagattccgcggatatgattttaaccaacgataacttcgcaacaatgtccgtcgcaattcgtgaaggccgccggatttacgataacatcaaaaagagtattctcttcttactcccgacttccttcgcggaaggcttaatcatcgccttcacgattttgatgcaacaagatatgccgttgcaagcgacgcagttactctggattaacatggtctcggcgattacgattcaattcgccttcatcttcgaaccagctgaagatggcttaatgacccgcaagccacgtaagaccggccaagcgctgatgaataaacacgatgttttccaaatggcatatgtttccgtcttgatggccttaatcggcttgttagcctacgattggttactcggccgcggtgtcgatcaagtcacagccagcacaatgatggtcaatatcattgtcatcagcaagattttctacttgttcaatattcggactgcgaaactcgccttttcaaaagctttcttcaccaaccaaaaggcattcggcattatcgccctgatgattattctccaattgatcctgacctacgtgccattcatgcaacaaaccttctacaccgaaccgcttaccttattagaatggggcgtttcgatcggcgcaggcttcttgattctaatcatcacggaattcgataagattatccgtttaatctgggcaaaaagaaaggcatagtaaaagagcgtttttctcgataggatgagagaaatgctcttttttggtgtgcttttcgaaactggcttttccggttaactacaaaatgtgacttatgaccaaacccgtcataagtcacatttttaggttaatcctcaaagtcgacccgcttcaaacgcactctaaacgtgcttcggcaagcatatttctgtacttaaccaaattcacccaatcggcgattacatcgccaattgggcaaatccagttaatgctcaaaatataaccgcttgcctacgcactctataatctactaatcacttcttctacattcttaatctccaccgacattgtgccgtctgggtggttgatgaattcaaatagatttgggttttggtaaacgtcgattgggacgattagttcgatgccgtttgagagtttgagtttttgtttgccgtatttcttttcggcgatttcgcggacggctggtgagattggcgctggtgctgctggcgcgttttccgtcatttctgctttaaactcactttgggctgaaacgttgtctttaaaaatcttcgctgccatctggctcgtgtcgatttcaccattggtttcgattgtatcgtagatggcttctttgacgttggcgaccacatcgtgtttggcaacttcgaacttcttgccgattttttcagcggcctttttaacgaccttgacgttttcttctagcgatggcgctggttcgctttcaatcacgttcgttgataaataggtcatcttttcaccggagaaggtgtacttcttctccatcaattcgaagccaaacgtctggaggttaatcgcgaacccctcatccgccttttgggtcttattcgatagaatcgattggtgaatgatcagttgattcatcaatggcccctcttcagcattgacataatgggtgaaggcttgatgataatcgaccttcaaaaaagccaagtaagcttgggcatcttgttcatacaagacaacaaacgcatccgcactcggtgcatcgtcacttttctgatagaccgtgtaccatttttcaacgaggcgttggctagcgccgataaaatcagctgtcgcatcgcgcagaaaagatgcgagctcagcatcttggcgtagcacgccggtcttactctgggcagacgataatttcttaatcttgttggttaaatagtcgcgtgtgttcccattggtgagatctagcacctgttgtgagtaaattggatcgccgagttcgcggtcgaccacttgtaaaattgcttgtttcaaataaatatccattagttaacatcccatctgtctagcgtgtaaagtattgagcgccttcaatcgtgtggaagaaaatcaccgtttcgaccatctcattgttgacgctttttaaaaatggccattcgccttgtaacacacggagtgccgtgcgcggccgtgataattcccgttcaaaattggcctgtacctgaacgggggtgtctttaaaaatatgcgcatcgtataaatagcgcgcatatgccgcaaaaatctgttgggcctgttccgttttaatcgcggcatacacttcacggagtgtctgcagtccatatgtcatcagacttgccaacatcaacgacccatttctagtctcaacacgtttcaaatagcgaattagattaccccagaactggctatacgcctgaatctcatcttttcggagatatggtgctacgtcagtcacaaacgggtaatgccaatttttagcattcaaatagcgcaccgtcccaatgtagaacgtatacggaaagccaaaatagatccgcgttaaatctttaatgaaccattcattttcaattgtagcgtaattgtgccccaaaatcgcgtggacttgcatcgctacagctggatcttgcgtattgttgtgcttagtcaatgcgaataattgttgccattttgaagcggataaaagatccggccgataatgctttatttgttttaactgaaccggggcagcattcaaggtatagccaccatcaaacggttcatccaataattggaccgtctgcacaaaatgccccccgagtgagtgacccagtccatagatgattgttgccggattaattcggcgcacccgccggaccacataccgcgtaaaccgccgtgcgagttggagttgctcatcattttcggtattgccaatcagcatcgcatcaatattatacttccaatcttgataactctcacggacataattatccagccgctgcgtaaacgacttaatccgcggatcatccatcgtcccctcagtccccttgtaggaaatgtaggtatacgattggcgattaagcgtgacgtaataggcaactgccgaaaaaccagtttgttccgcattcggcaaaaccgttcgcgcatcatagtgaatcaccgcttccgccgcttgatgcgcgtgaataaacacgaggtacttcacgtaatattgcaattcctgcacgttaaaatactgatctaaataattaagagccatcatgtccattttaaaagcgcggctatcaaatggatcggccagtatcggtcctggcttactcgtggccgccactttatcaggggctatatggtataaataggcgagcgcctgcttcgtcagtaccgtactctcattgattttttcattttgtaaattgataatcagttgtttcaaacgattaatcttgcgttggcggttaaattgcggatttgcttgaacggctgccaaactcgccacatccaatgcctgcagtcgccgtaacttggcccacaaatagggatcggctcccgccgtcgccaataattgatttaatagttttattttacttgttttaagttgttgatagctgaattctagtcggttattgcgccgtaataaggcctgcgattgcgcacggtcaaacgtcaacggcacatctaaatgcgctttgaacaataacttacccatgtcatcgaagacttttgccaaccgaaagagcgtcgagatgatcactgtcgtttccatttgcatcattccttatttttgtaatacttctattataaagtatctgactcaaaaaaactgagacgaaatcgtcccagcttagatggttttgggtttgatgcgcacacctggttcaaacgtgctttttggtcgcaacaacttccgcttaagctaaaatcaccagtaactccaaaaacggattactggtgattttgtcttaatgctcatttgctaaccgcgaccaaacgcactctgttcttaaacgtgcttcagcaggcatatttctgtggctaaccaaatttgccaaattagcgattgcgtcgccaattcggcaaatccagttaatcctaaaaatacgaacgcctgcttacgcactctgttctatgcagtaatttttttgtccacagcttggacacactagttgtcttgtctttggcgtgtgccgggcaaagaacattttacttaggcgtggtttgaagaccgtcttgcaattgggacatagatagacagtttcttgatagtagaatgttgtcacataaatggccatcgcaatgatgaccggtatcccaatccacattggccaccaaattccacttagaaacccaagaattaataagccaatttccacaccatcaatcaataagccccacatcagcattcgccgatgtaatctttttaactgtgttgttttagccattgcgtcttctatgtcgctgattgtcatttcaaaaggcaccgcgctagtattttgaatcgattgcagtacaaactgcaacgccactttctggttagctaagtctgtttctttttggactaactgattgagttgctgttcgactagcaatgtcagtgtatccgtcgaagcttgactcgccatcactttttgaattgccttcagtgaaaagcccagctgcttgtagcctagaatgacttttaacgtctgcacttgcgcatccccatacagccgtcgtccattttcagttaagcttgccggcttcaacaaatcggcctgatcgtaatattgcaccgtccgcaccgaaacatcacataatttagcgagttcacctgttgtatattgcgccatagaatatcacctccataccttgatactagccgatgacgtaacgtcacaagcaagtaaaaaagcattatttgctaaaacttttattcgttctcctttaatgcaccaatcatatcaatcccttttaacttgcgatgggtcatccccatcacaatcagtgaaaatagcaccgtcatccctgccgcaatcaggtagccgctagctggaatgatgagtggaaaggccacttgttctgacgaggccatcgtgatgatgaaccaagtcagcaatttaccgattccaaagccaagcacaatcccaataacggtgaagattacattttctcgcacaatataggccgtcacttctttgtcgaaaaagcccaggactttaatcgttgccaattcacgttcccgctctgaaacgttgatgctagtaaggttgaataagacgacaaacgctaaaaccgctgataacccgatgaaaataaaaacgattgggtctaaattagcactagccgttgcttgcttagccccttgatcactgataaacgttgtggccgccacttccgttgtttgttgcaaacgggtcgccaactgtttttcttgcttggtagtcatcttagcggtgcgcacgagataggcattagccgcaactggttgttgtagcgtttttgaaagagcagattggcggagatagacgctgttaccaaggtagttttcactgatacccgcaacctgaattcgtgcacgctgaccttgtgccgtttgtagcgttaaccaatcgcctttttgaacagcatatgttttagcgaggttcgcagcaataatcgcaccgtgtttcggcaatgtgagtcgttgttgttctcgcggtgtttgcaaagcgacgtactgtgcaagttttgcttgatcagcgaccgcacagactgtcgccgcttgatccgtaatccctttttgcttgaacttaacctgggtcattgtgaccggtaagtaagaccgaaccttctcagtctgtgttaaaatcgacttcgtttgggctgtactattcggtattttaagcgtcacaattgcttggtaatgggtcaattgcttaaactgacggtcagcaacttcgccaattgacgtctttaaaccaaagcctgcaaccattaaaccggtacacccagcgatgcctaagatggtcagaatcatccgtgctttatagcgaaaaagattacgataagttactttttgatggaaactcaatcgccgccagagcggtgtgattctttctaaccaaatccgttggcctggtttcggcgcttttggtcggagtaattgggtgggcttctcgcgtaaatcgcggattaaaacataccccgtggccccaactgtcgcaatcaagaccgctccagtggctaataaaattggaactgtccaaaaatgggttggataatgcgcaaaggtgtagaccggtttttggattcgatagacgactagcggtaataacttcgtgcccaaaatggtgccaagcacggtgccgatactacctgttagtagcgcatatagtaaatacttctgcgcaatttcccaattacgatagcctagtgccttcaatgtcccgatttccttacgattttcttcgatcatccgcgtaatggttgtaaaggtaattagaatcccgattaagaaaaagaagaccggaaagacattccctatcgcatcgatgcgatccgacaagctcgtaaattcattaaaacccggattagcactgcgcgcagttaataagtactgttgctgcggctgagttgtgtgtgcttttaattggcgcatgagctgtgtttctttagtcgcaatgccggtgcgataagcctgtaaaaagctactgtgacgatccaaatcactaaagcgcaccatcatcaccgaatacggttgaggtgcaaatgccttttgtggcaaatacataaagccatctagctgaccatccccgaccggtacggttccacgttcctgacggtcgatatatagcggtgagtccacataaccgaccactttaaaccggtgcgtcaatagctgctgactcttaaccgtcaccctctgccccagacgataatgcgtcttgaccgcgttatccactaaaatttcattcgttcgttgcggatagcgcccggtagtcagcgttaagcgattttgccgtgcagttggttggtaattatataattgtaagttaacatcccgcgcttcatcgcgatacggaatccgataacccaattcagcttggacaccatgcattttttcgaccaccgcacggtcctgttccgttaagccagcggtcccactaatctgtaaatcggatacgcgttgcgtggtgacaaaatgatccacagtctcttctaagttcgggccaatcgatttaatccccacaaacagtaagacacccattaaaataatcaggataatcgcaatgaaccgtccaatcgcctgccgaatatcgcggaatgtggtttgtaaatataaacgtgtctgcatattaaccacctaccattcaatcttttcaactggcaagggattagtgttcacttcaattgaacgcacgcgcgcatcgttaatgtgaatcacgcgatcagccatctgagcaatcgcggcattatgcgtaatcaaaacaacggtccggtgttgttgccgactaacttcttgtaataatttaagaatctgcttgcccgtttcataatcgagtgcgccagttggttcatcacacaagaggagcttcggattcttagcaagcgcccgcgcaatcgccacccgttgttgctccccaccggatagttgggccggaaaattctgaagccgatcctgtagaccaacttgttgcaaaacaagcgcaacatctaaagcattcggcgagacagccgttgccagcgccacattttcttgcgtcgttaaattcggcactaaattgtaaaattggaacacaaacccgacatcagtccggcgaaacgccgtcaattggcgcgcactaaactgcgcaatatcgacaccatcaatcaacacttgcccttcatcgggtgtatccatcccacctaagatgttcagcactgtcgattttcccgcaccactcggtccgagaatcaccgctaactccccttcattgactgtaaaactaatatcatgattggccacgattgttgtctcgcccatctgataccgcttggctacatgtcgtacatcaattaaactcataacgatcactcctatacctatttaaccggttacatttgactagttttattatcgcatatccgagcttgcacgacacaaaaaaaagacaatcagaaaactgattgtcctttaagataagtaccattttttcttaattcaacgtaaagccctgttttttcaaaaaaatcgccactgctggtcgtcgcacttcactaaagaaggccgtattcttggtcgaccaatcagtttgttgctgattggtcccacgattagcataataattttgcatttgttgatcgtattgcactaaattggttgcctgatgcacatcatattgattttgagcgacttgattaacttgcggtaatcgtggtttaacctgatttttagtcttcggaatcccgaccgttaacccaaatagtgggacggtataggcgggcaacccgagtagttcagcgacacgcgcaatgtcattgcgaatcccaccgatataacagatgcctaaatctaacgattcggcagcgactgccatatcctctgctgcaatggctgtgtcgatcgttgcgactaataaggcttccatattttgtatgccagctaatgactggcccgctttttctaagagtgtggcttgtcggtataagtccgcgacgaaaacatagaacgtccccgtctgtttaacgtacgccgcactttgagaaatcgttgcgatttcatcacgaattacgggatcggtcacttcaatgattgaaaatgcctgaacgaaattcgaagaagacccactttgagctgccgcaatgagttgttgtttcactgtcgtgctgaggggtgttggctcgaaatcacgaactgaaacatggtgttgcatttgttcgattaaagatgacatacaaagactccattcgatttaaaataagttgcttctagcatagcgcgttaacacaaaaagggctagcgcaaaattgccctagcccaaaaacgtgctttttgaaactggctcctgtgcttaactacaaaataagcactatggcaaggaccgccatagtgcttatttttaggttaatgctcagaaccaaaccgtttcaaacgcactttgtttgaaacgtgctttttggttgcaacaacttccgcttaagctaaaatccgcagtactcctaaaacctggattactgcggattttgtcttaatgctcagttgctaaccgcaaccaaacgcactctttaccagtggatttcgttaaaaatctttggccctttgcgcatctttgtccgatcatttttagcaacgtcggtctgttttgatctgccgccaccttttttctgatcaattagtgcttgcattttttctttttgcgttaattttggtgtttgtttttcactcatcttctgactcctaacttttctacattctataagattagcatagaattcaaagaatgcctaaccgttattttgtagggccggaatcaagcgctccgtcacttctcgtacagaaaacgggttttgccccgtaatcaactgaccatcctggacagtaaatggtttgtaaaaccgtttttgcacaaattgcgcgccgttttgagttgccacttcttggtttaaaaatggcaccacttttttcttgcccgcaataatttcttctgcagtggtaaacccagtcacttttttaccagcaatcagatactgaccgtcatcatttttaatgcgtagtaaacccgcgatcccgtgacaaacggacgcaagatagccactgtgattataaatttcccgggcaattgcttgtaattctggattatcaggaaaatcccacatcacgccatggccgcccgtatagtaaatcgcagcgtaatcagctggattgatatcgcttggcttgagcgttgcgactaacccccgttgcacgtaatccggttgttcatagatggtcagaattgattcatccgtgtacttcatcccccgtggatcaagcgggacaaagccgcctttaggactgacaaaatcgtaatcaatccccgctttttgcagttcatcaacgaactctgcggattcccccagccataatccggttggatcggtggttccttgataacgcgtaacattcgtatggacaattagtactttgggcatctggttagcctccctaaaaattagtgatgtgggtttattaaatcgttttgttcttattctgtcaattgaaaaataactacttacgtcgtaacaatccaaatagcgttctgaattgatttttaaatgaaacaacatcattgaagatgtcttcgccgtcgttcaacatcttgaccgttaaccagccgagcgcttcggtaatcgacatcgcaacggtcgcattgaccgcggctccggtgaccgttccaacgaccggtatcagttttagaatgttaccgactgcactccgacctaggccaacgagtaccaattctttcgacaggctcttgcccaaactagccgaccaagattgaccgaatagtttatgcaaacgcgccatcatcgttaattgaaccggcaccaacaagaacgcatcggaaaatggaattggtgaacagccaataatcgctgctgttagtgatgctgcgtgaatgatattgtgtgcctttttacgcatctgatcatccacaccgactaggaagtcttcaaagaccccatcaaactgtgtccgactcttcgccatcgtcttttccgccaatgctttggattggttaaaagacttcgcaatcacagctgccgattgttgcggcaacttctttaagacttccgcaaagaaggaatcaaattccggatttggttcaccattcacttgttgcttattaaaaggtttcttcatcatgccacgctccttatctgattgactaacatcgctactttaaagcgattatataatattgaacaacagttagtctatcgagcgaaaggctgactttttaaagaatctcctgaaccccttcttcaatcgtcgtcaccttaaattctgggaaccgtttcttaaacttgtctgaactgaacaggttatcttcttcatatctaggtaggagttcttttaattcctttagcggtttgctgaaccagctaccgatgttgaactgccacatttttaaaacggtgtagtcgattggttgatgcgttaaggtgcctgctagcgcgatgatttcggcgtatgttttaccgtcatcacaagggaggtgccacgtttgaccaaacgcatccagcgtattgccaatcaacgccatcgcacgactagcatctggcgtccaaattaatgtccgaaccgcttgatcattcaatggcacgcgcacctttttgcccgccttgatattgttaaagaccattgtgttcgtaatgctttgcgtcttgcctgggccataaaattcagatgcacgacaaatgaccgcttcaattgcgccagttgccatcttatcaagtaacaactgtgcgatctccgctcggacaaccgctttgcggccaacgggttcaaaaggactcgcttctgtctggagcgtgctatttttcgcatacatataggtattatcgaaaaagacgagcttggccttgtgcgcgacgcacgcgttaatcacgttagtcatcataatgtgaaattgtgcttcccacatgtctgaattcatcggtaagccagcggtaaaataaacaatttcactgcctgcaaccgcacgatcagtttgggcggcgtcgagcaagtttgctggaaatagttgatcgttcgcgttcactttttttggattccgactgaccagtcgaatgtccgttgtgaagtccttatgaagtgccttggctaactcttggccaatctgaccgctactacctaagatggtttgcattttaaaaactccttttactgttgtttttcgatgactgccgtaatctgatccagcagtgtttttagttgattgatttcgcccagttcgtgttgcaagtaataatagttcttcgtgccttcgcgtctaaagtcgaccaagttggcttccttcaacactttcaaatgatgcgacactgccgggcgcgacaagtccgacgccgccattaaatccgtgacctgtaagccatcacaagctttatcagccatcaattctaaaataatactctgccgcttctcatccccaagcgccgtcaaaaacgggctcagctcagcaaagctctgtttaataaccttcatttcatccatacattaatctccggttttattttaatggttcataagtttaaaccattaaaccattgatgtgaatttttgtcaacaacttcaaatcaatgcaacaaaaaaagcctcactcattaactgagtgaggtcattttattaatgattcccttgtgtaatggttgtaatactccccatatcatatcgatgtcgtgtggttgagtattcaaaaggcagcccgttttgtagaaagactgtctgggtaacttgtaagacaggttcgactggtttgcagtgcaggtattcttgatccatttgattcggttgatcggcactaattcgccggtaagccacgccaatctttagatgcaatgtttgttccaagtattcgtagatcgacttcttaagtactgcgtctgttaattcccctaaaatcttagccggcatgatcgaatgctcaatactatagggtacttcgtttaaaaaccggagtcgaacaacgtcatagaccgcttctgttttagctaactgaagcttttcttgttcttctgcatccggtaatcgcaattcattctttagaatgtcactctttactgtggcctttccggcaaacagcttagtcgtccctacatattgattcacagtcgcatctaattgtgatagcgcggagacgtttgatttgataaacgtaccgcgcccttgttcactataaatgagcccttcataagttagcatttcgagtgctttttgaatggtcattctcgatgtttcgaattcttgggctaacttcttctgttcaggaagcggaccatcagctgaatattgtccttctaaaattcgggtgcgaatcgttgtcgcaatatccttatactttgccatagtaaccacctaccatttgatatggttattatagcatattcagattcggaatattcgttgttcaaattataaaatatgactttacaagttacattaaaagcgctatcataaaatcattcaagtgatggaggtaccatgatgacgttagacaaacattttttatggggtaattctgtatcaagtatgcaaagtgaaggtgcctgggatgctgatggtaaaggtttatcagtgtacgatgtgaaacctgagacagctgatttatcggattggaaagtgggaattgatgaattccaccgttatcaagaagatatcgatttaatgcaacagatgggtatgaactgctatcgtttccaaatttcatggacgcgcattttcccaaatggtgatggtgaaattaatttagcgggattcgattattatgatcgattgatatcagctttgctcaaagcgggcatcgaaccgatgatttgcctgtaccattttgacatgcctttgcatcttgctgaaaaatataatggtttctcaagtcggtatgtcacacaagtattcactaagttcgctaaggctgtcattgaccgttatggtggacaagtcaaatattggctaagctttaatgaacaaaatggttttttctttgaacctggctttgataatactggctttatcaacggagagcgcgacttattaaccctttatacgatcgctaataatacaatggttgcgcatgctgaaatcgccaattacttacacgcccactaccctaatgaccaaattggtgggatgttagcctatcaagaattctatcctgcaaccagtcatccccaagatatctttgctgctagaaaagcatcagaatttatcaaccaacatttcgttgacgcctttacaaaaggtcactattcagccgaagtactgcaatatatgcaaaatcatgacttaatgagcagtattcagcctggtgatttagcgctcattgcaagtcatcacaacgacttcttagcgttcagttactactacactgtcgcactcgatcacacaaaattaacacccaacacaccacccaattattacatgcgcgatgcgagtgtccctaatccttatttagaaagtagcgaatggggctggcagattgatgccctcggttttagaaacgtcttaacaaaactttcgaatgaaactggcctccccatcttccccatcgaaaacgggattggcattcgcgaagaatcgctgaatcatgaaatgattcaagatgacgaacggattgcctatcaccgcgaccatatccaggctttgaaagacgcagttgatgaagacggcgctcacgttgtgggctatcttggttgggggttaatcgacatcccaagttcaaaaggtgatatgaataaacgctatggcgtcgtttatgtcaatcgaaccaatcacgacctcaaagaccttgctagaattccgaaggctagtttttattggctgcaaaaagtcattcaatctaacggtgaacaattagactaaaaaaagtgcgttaaaaggagtgttttctatgcttaaacaaggaagtcggcgacaaagatttattgatcagtttacaaatatcgcctttaaaatcgggaatcaagtgcatttgcgttcattacgtgatgccttcgcgattattatgccactattcatcctcgccggaattggggtgctcgtgaataacgttgtattcccttgggtcctccacggccaaatgctaaccaactttcaatacttcggcacttacattaccaatgggactttgaacgttgctgggctattactcgcacctacaatcggctactgtttagcgcgtaataagaattacgtcaacaaaatttccgcggctgtcatggcactagggactttaatcatcatgatgcctaatactgttccggtcacaccactagctgccaaaaaagccgtcgaagtttctggcgtcttaactttccaaaacgtgggaacaaccggaatgtttgccggcattattattggtttagtcgcaacagaactctttatgactctttcaaagcttaaaaaattacagattaacttgagtgatgccgtcccatcagctgttgctggttccttcaacacaatgattccagccctcattacagtgagtctttttgcggcacttgctgcgattttaacggctggtttccacactgatctcatcactttaattacaaatgtgattcaagaaccacttcggcgcgttaatacaagtttaccgggtctccttttgatttacgggactggtaatctcctcttctcatttgggatccatcaagctgtcattaacggtactttattggatccagtcttactgatcaacatgaacaaaaatatggcagcttacgcagctggtcaacacatcccttatatcatcaacaacgttttccgcgatacatttgggatgcttggtggtaccggtagtactatttgtttattgattgcgaccttgctcttctcaaaatcacgcgctagtcgtgatattacaaagctatcattcgtcccaagtttatttaacattaacgaacctgttatttttcggttatccaattgtcttcaactttgcgctcatcattccatttgtcctaatgccaggacttggcatcagtattgcctacttcttcaccgcaattggctggatgaatcgagtagtcgtcatggtaccttggaccacaccaccattactcaactcctatttagcaaccggcggcgattggcgcgcccctgtgattcaaggcttcactttaatcctcggcgttctaatctactggccattcctgaagattagtgaacgcgttgcggccaaacaagctgaattaacgcaataattaaaaaaaagaattcagaattttcgttagaaaattttgaattcttttttgttttaccgatgatcttaacctcccctggtcttataaatccggattaggcgtaatcacttgcaacttatgttctaagagtcgcatctccaatggtgacttggcactcggatcaccatcaatgcgggtttgtgcactttgctgattgtcgactgtgatgctgatttcattcgctttaaagtaagtcatcccgggaatcttcttaaaattacccgttaagaaataagggagaaacatcactgaccgtgctagcgacattttcggcgcaacgaagacatggaaataaccatcatcgggttgcgcttcgggattgaagttggtaaatccaccaacggaattcgtgagggtcaccagcaagaattgcgtgtctttttgccagtgccgatcaggcgtttcaatcgttagcggataatgctgatgctccgctaatgcatggatgcctttgcttaaaaaagctagcggcccccatttttgtttttcactctgagtcacgttcaacgcggcgtccgccaaaatgcccaatgtcattgtactaatcaagtaatcatcgttcacttggccgacgtcgagtgggcgcagatgaacctgctgcagattttcaatcgcttgatcaatgtccaacgggatttgtaacatccgcgccaaattattcacggtcccagcaggtacaatgcctaaataaggcggctgatctaacgtcgcaagaccactaacgacttcattaatggtcccatccccgccgacagcgaccaccacatcaaagcctgcccgcgccgcttttttagctaaccgcgttgcatctttcggcccttccgtcggcatcagttcgaccttgtgttgattcttgatgagtgcctgctcaattttctgaccaaccgactcaccattgttgtgcccagagtggggattataaataacggcataacgatacataaaaaagcctccttcaattactctaagcatagcaaaaatattgggaataggctgggatggcgcattaggcttacacttaaaaagtctgatggtgtcaaaaacaaaaaaacaccccgcaatataaaattgcgaggtacttgtaaacattgatataaaagtgatattaacgtttactgaattgtgaagctttacgagctttcttaagacctggtttcttacgttccttcatacgagggtcacgtgttaacatgccagcgctcttaagagctggacggaagtcagggtcaactgtcaatagggcacgtgaaataccgtgacggattgcaccagcttggcctgagaatccaccaccattaacgtttaccaagatatcatagctatctgttgtttcagtaattgttaaaggttgtttcatatctaaaatcaagttagcaaatggaatgtaatcaacaacgtctttgttgttgatagtgattttaccagtacctggtactaaacgtacacgagctactgagtttttacgacggcctgtaccgttataagttacttgagccactatagtttcctccttaaataatgtccgtaatgtctaagacttctggattttgtgcttggtgtttgtgttcgccaccagcgtatacgtgtaacttcaagaattggttgtgacctaatgagttcttaggtaacatccctttaactgacatttcaattaaacgttctgggttgttttcacgaatttcgccagcagtccgagttttcaaaccaccaggatggttactatggtgatgatataacttgtcggttgctttgcgacctgttaatttaattttttcagcgttgatgacgatgatgttatcacctgtatcaacgttaggtgtaaatgttggtttatttttaccgcgtaagatagaagcgactacagttgatagacgacctaatgcaatatcagttgcatcgatcacataccatttacgttctacttcgcctggtttagccatgtaagttgtacgcacgatttattcctccaatattctgtgtttgtttgacactcaataagtttccggggcctatcgtggggcaaacaataccagatactatagtatcgtaatttcacgattaagtcaattgaatctcaattattttcatcagtttcgtaataaacttttttaaggtacaaaccgcttgctggcgcggttgagcgagcttgttgacggtccttaacttcatacagccgtaaaaaatcgtggacatcccgccgaccgttaccaatttctaataaagttccgaccaagatccgcaccatgttatacaaaaagccgttcccataaaactcaaaaacgagttcattttcgggttcattgaaaacaacggtcgcatcataaatcgtccgcaccttatccttaatgaccccacctgaagccgcaaaactcgtataatcatgcgtgcccatcacatctggcagcgccgcttgaatccgttccacatcgattggatacggataatgaccggtataacgtcgcttgaatggattcgtataatgcccaagatcgacccgatacatataccgtttaccgaccgttgaaaatcgtgcatgaaagtcatcatccgctaactgactatccacaacctccatatcaagcggtaagaggctatttaaggcccgtaacatactaatagcgggtaattgacctggatagtcgaaatggaccacctgccccgttgcatggacacctgcgtccgtccgccctgaaccatacacttgaatataagcacccttactcatctttgtcagtgctttttctaatgtgccctgtactgttcgttggttcggttgcacttggaaacccgcaaaatccgttccatcataggcaattgttacgcgataccgttgtgtcattttatccctcttgtgttaaaaagttagtagttctattctaaataattttctgaaaagtagcaatctttttatgaatgttcgtaaaaaatttgatttaaaaatgcatttttaatataaaacaagttcaaatgctgtataattattattataagtagaaataaggagaattgtgcaatgaagttcggatacgcacgcgtttcatctgccggacaaagtctagcaacccagattagtcaattaaaggaagaaagctgtgacattatctacagcgaaaagtttaccggaactaccgttgatcgccctaatttaatgaactattagatcgggtttcaagtggtgataccatcgttgttacaaaacttgatcgcttcgcaagaaataccaaagaagcacttgaaatcatccaagaactttttaaagcccgcattaaaattcatattttgaacatgggcatcattgaagacaccccttccggacgactcatttttaccttatttagtgcttttgcgcaatttgagcgcgatatgattctcactcgtacccaggaagggaaacataatgctcgtgtcaccaaccctagttacactgaaggtcgtaaaacgacctatactgatgatgaacatacaagcagccctagacatgcgtgaagagggctttacgtacgctcaaattagttaccaaactggcattagtgcttcaacgttgaaacgtcggttcaaaaaacaagctaatcaaaaaagtgcaaaaaaaaaggactcagctaaatcaacctccgttggtttaactgagtcctttttgcgttatcttaagaataaaagtgcgacggttaaaaggcccatcgtgataaatgccacggtgtctcttgtccgccatttcaaaattcggtacttactgcggccttcgccaccttggtacccccgtgcttccattgccgttgctaaatcatccgcgcggttaaaactgctgacaaataacggaattaaaatcggcacgattgctttcatttgttggaataaattcccttcaccaaaatcaaccccacgcgcacgttgcgcatccataatcttagtggtttcatccatcaatgttggtacaaagcgcaatgcaattgatagcatcaatgcaacttcatacactggaaaatggactactttaagcggcttgagaattgattcaatcgcatccgctaacgacaatggcggcgtcgtcaatgtcaggagagtcgacatgaaaataatcaatataaagcgcatgaagatgtagacgccattaatcagcccgtactgggtaagcgtcagaaatccccactgccaatagacatgaccaccacgggtgaagaaaatctgtaagagcactgtaaatagaattagccataacagcggcttaactcctttaataaagaagtcgagtttaatttttgaaatcccgattagcgctaacgtaaagaccagtaataaaacataggcttgccatgtacgcgctaaaaagatgatcccaatataataaaaactggctaataacttcgcccgtggatccatccggtgtaacactgaatcaccggggatatatcggcccagaattaatttattcatgtccaatccccgccttcttcggtagttgttccgctaataaggcggccaattcatgttcggttagtggtacttgatcaaagacaaagccttgtcgcattaaagcttgcgcgaactgagtcgttgttggtaagccaagttgtttttccgttaaccaatccggatccgcaaaaatttcgcgtggtgctccggtcttagctagcttgccatgttccaaaacgataacgttgtcggcgtagttcgccacatcatccatctgatgggtgaccatcacaatcgtcatcccctgctcactgtgtaacttttcaaaaagcgccatcatctcacgccggccaactggatcgagccccgcggttggttcatctaagaccaatacttccggtttcattgccaacacaccagcaatggcaacgcggcgcatttgcccaccagataaatcaaaaggtgacttgtcaatcacattagcgggtaaaccgacgagttcaatcatctctttagcgcgttcaagtgcttcagcttcagggacaccgaagttctgcggaccaaaagcaatatctttttgcaccgtcgactcaaataattggctttcaggaaattgaaaaaccatcccaactttttgacgaacagcctttaagtttttgttgttggtctcaggcgtgatttcgcgctcaccaatctgaacaacgccgctcgttggttttaagagtgcattgaggtgttggagcaatgtcgacttgccactacctgtatgaccaatcaaagccgtataggagccacttggaatggtcacattgatattttctagcccaatcccttgaaaaggcgtgcctggctgataagtgtagcttacatttttgaatgtaatgtccataagtactcaaccatcctttccgttgtgagataatctgtgggcatctcgatagcgcgttcatttagcgctgctttaagtttttctggatatggaacatctagccctaaatcaagcaaacgttgcccatatgcaaaaatatcggccggtgtgccctgatcatgcacttgccccttatctaagataatgatccggtccgcacttgcggcttcgtcaatatcgtgggtaattgatagcacggtcatgtttgtttcttgttttaacttatgaatggttgcgagaacttcttcgcgcccttttggatctagcatactggtggcctcatcgagaatcagaatctcaggttgttgtgcgatgatccctgctaaggccactcgttgtttttggccacccgacaaacggcttggttcacgtttcaagtattcactcataccaacacgttcaaccgcgtctttaacccgttcaatcatttcagctcgcggaatcccctgattttcgagaccaaaagcaacatcgtcttcaaccgttacaccgacaaattgattatccggattctgaaaaaccatgccaattttctggcgaatagtccacacgttatccaacgacaatggtaacccatcaatcgtcactgatcccgattgtaaatctaacaaaccgttcaatgatttcgcgaaggtactcttaccactaccgttatgaccgataatggcgacccattcgccggcattgatactgacagaaagatcattcagtgctaaatgtccttcagattgtgggtattcatattttaaatgttcaacttgaattattttttgctcattcatgattaataacccgtattttccttggaattaaagtgcattggttatgttatccatgcacgtttcaaatcaaaaacctgttcctattttatcatataaaaggccatagcgctttcgttagtcaccctttattcaaaggatatccaacacaaaaaacgtctaactccgatttaactcggaattagacgttattttatgtaaatcatcaatcgatgaaagccatactgtgttgctagtatgaccttaggactagactcggagtacttccatcatcataacgccctgtctcatcgatcaaatgacctaaatcattttgtgattaaacaagttcaataatcaccattaatgcaccgtcaccacgacgaggggctgttttaagaatacgtgtgtaaccaccatttctttcagcataacgtggagcaatgtcactaaataatttttgtaaagcagattgaacgattacagcatcgtcttcttcgcgaatatcagctacttcgttacgaacgaatgctgcagcttgacgacgagcgtgtaaatcaccgcgtttacctaaagtgatcattttttcagttgttttacgaatttctttggcacgagcttctgtagtaatgatacgttcattgatgattaaatcagttgtcaaatcacgtaacattgccttacgttgtgagcttgtgcgacctaatttacgataactcatgaatggagtccctccttcttatcagtttattcttctgtgcgtaagcctaagccaagatcaaataacttgttcttaacttcttctaacgacttgcgaccaagatttctaactttcatcatatctgcttctgatttgtcagttaactcttgaacagtgttgattccagcgcgtttcaaacagttgtatgaacgaactgataaatctaactcttcaattgtcatttcaagcattttctctttatgtgtctcttctttttcgaccatgatttcagcatttttcgcttcatcagtaagatctacaaagattgccaaatgctctgtcataatcttcgcagctaagctaatagcttctctaggactgatggaaccgtttgtccaaacatcaagtgttaacttgtcgaaatcgttacgacgaccaacacgtgtactttctacttgatagttgacacgactgattggggtataaattgagtcgattggcaaaacaccaattggcatatcgtctgacttgttttgatcagcagcaacataaccacggccttttttaactgtcattcgcacgtggaaattgccgccttcagctactgtacaaatatattgatcagtatttaagacttcaacgtcatcatcagaaatgatatcagcagcagtaactgttgccggacccttaacatcgatttcaattgtcttgtcttcttcaacatgcaatttaagtgctaattttttaatattcaagatgatttgtgttacgtcttctaggacgccatcaattgttgaaaattcatgtaaaacaccatcaatttgaatatctgtgacagcagtacctggtaaagaagcgagtaaaatacgacgtaaagagttacctaaagtcgtaccatagccacgttcaagtggttctacaacgaacttaccgtagttagtactttcatcaacctttgtaatgtttggtttttcaaattcgatcattcttatcttttacccctttcaaaacgagaagtgtttatacgtgaacacgtttcagtttgtctcaaaatgaagcgtagcccagactaaacacgacggcgttttggaggacgagatccattatgaggaactggtgtaacgtcacgaatagcagtaacttctaaaccagttgcttgtaatgagcgaattgcagcttcacggccagaacctggtcctttaacagcaacttcaacagatttcataccatgttccatggcttctttaccagcagcttctgcagccatttgagcagcaaaaggtgttgacttacgactacctttgaaacctaatgaaccagcagatgaccatgcaacagcattcccatgaggatcagtgatcatcacaagagtattgttaaatgttgagtgaatatgtgcaacgccggcttcgatatttttcttcacacgacgcttacgtggagcatttttcttgtttgccataaattataacctccttttactgattatttcttcttgcctgcaatcgtaactttcttacctttacgagtacgtgcgttgttcttcgtgttttgaccacgaactggtaatccacgacgatgacgcatgccacgataagaaccgatttcttgtagacgtttgatgtttaagctaacttcacgacgaagatcgccttcaactttaactttgtcgattgctgcacggatcttgtcttcttgatccggcgttaaatcacgagtacggacgtcttctgcgacgccagcatcagccaagactttaacggcagttgtatttccgataccgaaaatataagttaaagcaatcacaatttgtttatcacgtggtaaatccacacctgcgatacgtgccattcttgcacctcctgcttaattaatattaaccttgacgttgtttatgttttgggttagctgcgcagataatcataacgcggccttttcgtttgataactttacaatgttcgcacattggttttactgatggtcttactttcatatcgactgacctccttgatatgatccttacgcctatttaaagcgatacgtaattcgtcccttagtcaaatcatagggtgacaattcaactgtcacacggtctccaggtaaaatcttgatgtagttcttacggattttaccagaaacgtgtgccagaataactgcaccattttcaagttctactttaaacattgcatttggtaaagtatcagttactttaccttcaatttcaatgacgtcatcttttgccacgcaaaagtacccccttgtggttgtgaaaattcatacagaaaaatggtgagagctctccgcactcaccgctagtggtcataccgagatattatatcacaagtattaaatttttaaaagcactgagaattctgtcattaaacaactagtcaggcttttacgtgaacaatgaccgtgagatcacttgagttgatgactagtctttaatggtatcaagtactttttgaacggcagagaacacatcatcaatttcttgattcccatccaccgtgtaaagtaggttacgtttttcataataatcaagtaaaggtgtattcatttcgatattgacctttaagcgattcttaaccgtttcaggtttgtcgtcttctcgttggaagaaaacatgttcgccgcaacgatcacatgtaccttccactttagttggatggtaaagtttgtggtacgttgcaccacaatttttacaaataaagcggccagataaacgatcagccaagatttcaggatcaacatcaatgttaatcacaccatctaaaggtttgttcaatttatcagtaatggcagctaaagcatccgcctgatcaagagtccgaggaaaaccatcaaggagataacctacattagtatctgcttgtgcaagacgttcctcaacaattccgttggtcacatcatctggtaccaattcacctttatcgatgaatgacttagctttaaccccaagttctgtttgatctgccatagcagctctgaacatgtcaccagttgaaatgtgtggaatatgataagcgtcaacaatcttttcagcttgcgttcccttaccagcgccgggaagtcccattaacatgagattcatgcctttgcctcctatttaaaaccaggattcaatactttttaaacgataattgcttatcgaatgaatccaacatacttgcgtttcataagtaacccttcgagttgacgtgtgctttcaagcgcaacaccaacaacgattagtaaactcgtcccacccaaaccaattgattggggtaagccaccgaggtttgctgctaattgtggtaataatgcaattaccccaaggaacaacgcaccgacagttgaaagacgcattaatacgctagaaagatacttctcggtacctttacctggccaaacacctgggatataactcccttgcttagtcaagttctccgcaactttttcagggttaacctgaacaaaagcatagaagaaggtaaagagaacaatgagcaccgtataaacaatcgaacctgtcacagtctgcatgctgaagatatctgataatactttaaaccaagtatctgcaccatgacctgattggaaggccattaagattgtttgaggtgtcataataaatgaactggcgaagataaccggaatcacaccagcgacgttaactttaaggggtaggtaactattttcacctgcaccagcttcacgacgcgtatattgaatcggaatctttcgatttgcttgttggacccatgtcacaaatgtgacaatcacgagtactgcaataatcaaaccgatgatgaataagacacctttccacatatcgccttttgaagcgttcaagacttgttcgcggaagatttggtaaagaccgcttggaaggcgtgcaatgatccctgcaaagatgatcattgacacaccattccctaagcctttatccgttatctgttcacccaaccatgtaattaacatcgtaccacccgttaaaatgatcccgatgctaacgaaggtcttaatccccggatctttaaccaagcccatttgactgagtgagttaaagccagcggtaatccctatcgattggataaacgctaagatgatggttaagtaacgcgttacttggttaagcttacgtcgcccaacttcaccttgcttgctccattcaacaaacttaggcacaatatccatttgtagtaattgaaccacaatttgggcagtgatgaatggtgaaacccccatcgagaagatggaatagttcgccaagccaccaccacttacggtatcaagcaatgggatcaaaccagttgaacccaacttagtcaatgcaccagcattcacacctggtaccgtaatttgtgcacctaaacgataaacgatcaaaacgcctaaagtaaacaaaatcttactacggatttcctttactttaaatgcgtttttgagtgtctttagcaattaaatcacctcaattgaaccgccagcagcttctacagcagcttttgcagcttcagaatacttgcttaccttaatgttcaattttttgtttaattcaccattcgctaataatttaacacctgataattcattcttaacaacgcctgcttcgattaaaacagttgaagtaatttctgcaccgtcttcaaaacgatttaaatcgtttaagttgacaacagcatattccttacggttgatattcttgaatccacgttttggcatacgacggaataaaggcatttgtccaccttcaaatcctaaacgtactttactacgagctttttggcctttttgaccacgaccagcagttttaccagtacctgaagaagtaccacggccgacacgtttacgaacgtcacgagcaccttcgttaggtttcatttcatgtaatttcattattgtgcgcacctccttgcaatatatgttgaaattagtctttaatttcttcgactgttactaaatgtgcgagtttgaaaatcacaccgcgagttgcagcatcatctggtttgattacagaactatttactcggttcaagccaaattctttgaccattttacgttgttctggaagacgatgagcagcactttttcttaaagtaatctttaatttagccatgttcagttatcctcctagttttgtaagctttctacagatacattacgtaattctgcaatttcttcagcagtcttcatacgagttaaaccgtcaattgtggcacggataacattgatagcagttttgctacctaatgttttacttgtcacatcatcgattcctgctaattccatgacggcacgaacagcaccaccggcagcaataccagaaccttcaacagctggttttaatagaacacgaccagcgccgaagcgaccaataatttcatgaggtaatgttgttccgaccttaggaacattgataagattctttttagcgtcttcaacggctttacggatagcttcaggaacttcttgtgctttacctgtcccgaaacctacgtgaccgtctttatcaccaacgattacgattgctgcgaaacgtagacgacgtccacctttaacaacttttgtaacacggttgattgaaacaacgcgatcttctaaatctaaatgagttggatcaatgtaagtcataaatggttttcctccttattagaattctagtccgttttcacgagcagctgtagctaaagcttcgatacgaccgtggtataagtaaccgccacgatcaaaaacaacaactttatggccggctttaacagcgcgttgtgcaactaatgcgccaacttgttgtgcttgttctactttagtaccttctgcttttacttctttatctaatgttgaggcacttgctagcgtcacacccgctacgtcatcaataagttgagcgtagatgtttttgttagaacggaaaacgttcaagcgtgggcagtcagcagtaccagagatcttgccacgaacgcgtgtatggcgtttttgacgtgtcttattcttgtctggttttgtaatcacaattttcacctcttaatatcgtttaacagctcaggctgctttatttaccagttttaccttctttacggcgaacatattcatcagtataacgaatacctttacctttgtaaggttctggaggacgaacatcacggatttcagctgcgaattggccaacttgttgtttgctaataccgctgatgatgatgtttgtgtttgatgggacttcgactgtaacaccttctggggcttccatttcaactggatgtgaatacccaacgttcaatactaaagtcttgcctttcaattgagcacggtaaccaacaccgataagatccaatgtcttcttgaaaccttccgttacgcccaagatcatgttgtttaagttagcacgcatagtaccgtgcattgcacgatcactttcactattacgtgtaaagttgataaggttaccttcttcgtgcatttcaatcactggactgaaatgacgtgttagttcacctttaggtcccttaactgtgatgttttcaccgtctttagtaacggtaacacctgcaggaacttcgattacttttaatccgatacgactcacgttatgacacctccttattttaagtttagattaccaaacgtatgcgagaacttcgccgccggcagccttttcacgagcttctttgtcagttacgacaccgttgcttgttgagataattgcgatgcctaagccgtttaataccttaggaacatcattagctttaacgtaattacgtaaaccaggttttgaaatccgtttcaaaccagagataacacgttcgttattcttaccatatttcaagaatacacggatgataccttgtttgtcgtcttcaatcacttcgtaatcgcggataaagccttcgcgtttcaaaatttcagaaatttcttttttcatacgtgaagcagggacttctaatgattcgtgatgtaccatgttggcattacgaatacgtgttagatagtctgcgattggatctgtcatgaccatgtggaattaacctccttattgactctttataattaccagcttgcttttttcatgcctggaatttggcccttatgagctaattcacggaggcaaacccggcaaagcttaaacttacgatatacagaatgtggacgtccacaacgttcgcaacgtgaatattcttgtgttgaaaattttgctggacgatgattctttacaactaaagattttttagccaagaaattgacctccctttttatttagcaaatggcatgccaaattgtgttaacaattcgcgtgcttcttcgtcagtatttgaagttgttacaataacaacatccaaaccacgaacgcgatctaccttatcataatcgatttcagggaagatcaattgttcgcgtacacctaatgtataattaccgcgaccatcgaatgattttgcactaacaccgtgaaaatcacgaacacgaggtaaagatacgttaactaatttatctaagaaatcgtacattctttcgccacgtaaagttactttagcgccgattggcataccttcacgtaaacggaaaccagcgattgatttcttagcttttgtgattaatggtttttgaccagcaatcaaacctaattcttcaacagctttatccaaattcttagcgtttgaaacagcatcaccaacacccatgttaagtacgatcttttcgatcttaggtacttgcatgcttgatgtgtagttgaacttttcgatcaacgctggtgtcatttctttaacatatttttcttttaaacggttagtcatgtaaaaagtgcctcctttccccaaaagattatttatcgattgattctccagttttctttgaaacgcgtactttcttaccatcaatcactttgaaacctacacgagtagcttcgttgtttgatggatcaattagcataacgtttgaagcatcgatacttgcctctgtgtcaacaatcccaccattagggttttgagcatttggcttaacatgctttttaatggtattgataccttcaacaacaacacggccttctttaggcatagctttgatgattgtaccttctttacctttatctttaccactgattactttaactttatcaccagttttaacgaacattgatatacgcacctccttggttgtctgtaattatagaacttcaggcgctaaggaaacgatcttcatgaaatcactgtcacgcaattcacgtgcaactggcccgaagatacgtgttccttttggagtcttgtcatcattgatgataacagcagcgttttcgtcgaacttgatgtaagaaccgtctgcacgacgagcacctgacttagtacgaacgataacagctttgacaacttcaccttttttgacaacgccacctggtgttgcctgtttaattgttgcaacgataacatcaccgatgttagcagtcttgcgacctgaaccacccaaaactttaatagttaaaatttcgcgggcaccggagttatcagcaaccttaagacgactttctgattgaatcacttataggtcctccttccgtcacttatatatatattgagtaacgatttagataataactgctttttcaacgacatctaataaacggaaccgttttgtacgtgacaaaggacgagtttccataacacgcacaacgtcgccaacttttgcttcgttgttgtcatcttgtgcataatatttctttgaatatctaacacgtttaccatattcaggatgtgttttataagtttcaaccacgacagtaattgttttatccattttgtctgaaacaacacggccttggtacactttacgatggttacgactttcttcgctcaaagtaaatagctcctttccatttattatttgttaagttcttgttgacgtaatacagttttaatccgtgcaatgttctgacgaacttgctttaagcgggcggtattttctaattgaccggtagcttgttggaaacgaagattgaataattcttctttgtattggtgttctttttcaagcatttcagcagtggttaattcaataatatctttagccttcatttgactcgccacctacttcctcgcgttttacgatcttagttttaactggcaatttatgtgatgccaagcgtaatgcttcacgagcaacttcttcagaaacgccgccgatttcaaacatgactttttcacgttttactacagcaacccatccagcaggagcacccttacctgaacccattcgaacgccgacaccttttgcagtgtatgatttgtgagggaaaattttaatccacactttcccaccacgtttcatgtaacgagtcatggcaacacgagcagcttcgatttgacggttggtaatccaacttgattctaaagcttgtagcccgaattcaccaaaagtgacttctttgccaccttttgcagcaccgcgcatcttcccacggaattcacgacgatgttttacacgtttaggtactaacatgtttatttccctcctttcgtattgttgttggctttagcgggtaatacttcgccccgataaatccaagtcttaactcctaatttaccgtaagtagtcatggcttcgtcccatgaataatcgatgtctgcacgtagcgtatgcaaaggaacagttccttgagcatgtgtttcgacacgagacatgtcagcaccgttcaaacggccggcaacttgagttttaatacccttagcaccagcgcgcattgtacgttgcatagcttggcgttgagcgcgacggaaagcaacacgtgcttccaattgacgagcaatgccttcacctactaagtgagcgtctaaatcaggtttcttgatttccacaatgttgatgtgtactttcttacctgttaagttgtttaattctttacgtagattttctacttcagaaccgcctttaccgatgaccataccaggtttagcagtatggattgaaacgttcacgcgatttgcagcgcgttcgatttcaatagtagagacagatgcgtcagctaattttgtgttgatatatttacgaatcttaagatcttcgtgtaagaatgttgcgaaatctttttctgcataccatttagcgtcccaatcacggatgacgccaacacgaaaaccggttggattaatcttttgacccacgcgatatccctccttatgcttctttttctgatacaactacagtgatgtgacttgtacgtttgttgattggtgatgctgagcctttagcgcgaggacgaaaacgtttcaatgttggtccttcgttagcataagcttctgtaacgaccaagttttctgcatctaagtcgtaattatgttctgcattagcgatagctgatttcaaaactttgattacgactggtgaagcagctcttggtgtaaattctaagattgcaattgcttctgcaacgctcttgcctctaatcaagtcgactaccatccgtactttacgggctgccatccgaactgattttgcgctagctgttgcactagtaatttgatctgccattgagattcatcctcctttctagcgtgcttttgttttcttatcgtcatttccatgaccatggaaagttcttgttggtacgaattcacctaatttatggcctaccatatcgtctgagatgaaaacgggaacgtgtttccgtccgtcataaacagcgattgtgtagccaataaagctagggaaaattgtcgagcgacgggaccaagtcttgatgacttgtttcttttcgctatcggcttgtgcttcaatcttgttgagcaagtgtgcgtctgcgaatggtccttttttcaaactacgactcattatgaaacctccttcgaataaaaagttcaatgtgacttatgtttaagccgcattggctttagacatgttcaattggaattgattatcttgatttacgatgacgaataataagtttctctgaacgagccttactactacgagtcttcttaccaagcgtcttcttaccccatggagacataggagaaggacgaccgattggagctttaccttcaccaccaccatgaggatgatcattagggttcattactgacccacgaactgtaggacggatacccatccaacgtttacggccagctttaccaatcttgattaattcgtgttgaccgttaccaacagtaccgatcgttgcacgacatgtaagtaggatcatacgtgtttcgccagaagttaaacgaacgatagcgtatttgccttctttacctaataattgagctgatgtaccagctgaacgaaccaattggccgcctttaccaggttttaattcgatattgtggataagtgtaccatcaggaatattagctaatggtaatgcgttacctactttaatatcggcatccacaccagattcaacaaccatgcctacttcaagacctttaggggcgatgatgtatgctttgataccatctggatattggattaatgcaatatttgaagttctgtttggatcgtattcaattgacttaacagtcgctttgataccatctttgatacgtttgaagtcgatgacacggtatttttgcttatgaccgccgccacgatgacgaacagtgatatgaccatgtgcattacgaccagcagtatggctttgggattccaacaacgtcttttcaggggttgtctttgtgatctcagcaaaatctgagctggtcatattacgacgaccatttgtggttggtttgtacttaataattcccacgtgtataccctcctataattattctatttaagtgttgcttaatcttcgaaaatcttgatttcttttgaatcagcagttaaagtaacgattgctttacggcgttttttagtatagccagcatagcgaccttgacgttttaacttgccacgaacgttcatgatgtttacgtttttaacgtttacaccaaagatttcttcgattgcgtaacgcacttgtgttttgttggcacgaacatcaacatcaaatgtgtatttcttgtcgtccattgcagccattgaattttcagtaactactgggcgtaaaataacatcgcgtgcttccattatgcaagcacctcctcaattttagaaagagcagcttgagtaaggattaatttttggttgccaacaacgtctaatacgttgataccatcagcagctacaacagttacattaggtaagttgcgagctgataatgcagcaaaatcatttccgtcttcaagtactaccaatgctttagtattaacgtctaacttgttaagtacttcagcgaattctttagtcttaggtgcgtcaaagttgaatgcatctacaacaactaaatcattgtcgataaccttttgtgaaagtactgacttgattgcaagacgacgtactttacgaggtaatttgtagctgtatgaacgaggtgtaggaccaaatacggtaccaccaccacgccattgaggtgaacggattgagccttgacgagcacgacctgtacctttttgacgccaaggtttacgaccaccaccacgaacagctgatctgttcttaacagcgtgtgttccttgtcttaatgaagcacgttgcatgatgattgcatcaaacacaacgttttcgttaggttcgatagcccagattgagtcgtttaattcaacgttcccattttggctaccatcttgtttaaataatgttacgtttgccattggtaaaatcctcccttctcagattatttgttacgagctttaacagctgttttgattgtaatcattgagtttttagcacctggcacgttacctttaacaaggataacgttcttttcaacatctgtacttacaaccacaaggttttgaacagtacgttggttgttacccatgcgtccaggtaataatttacccttgaagacacggttgataacagcacccattgaaccaggacgacggtggtaacgagaaccgtgacccataggcccacgtgattgtccgtcttttttaatgttaccttggaaaccatgacctttcgttacaccagtaacgtcaacgacgtcgccggctgcgaaagtatcaactttgatttctgttcctacttcgtaatctcctaatgcgacatctctgaattctctaatgaagcgcttaggagtagtatttgcttttgctacatgacctttagcaggtttgtttgacaagacttcacgtttatcttcaaaaccaacttggatggcttcatagccgtctgtttcgtttgttttaacttgtaaaacaacgtttggagttgctttgataactgttacgggaattaattcgccgttttcagtaaagacttgtgtcatacctacttttctacctaagattccttttgtggtcatggtaacacctcttttctagtatttttaattggttggtacgaattaaagcttgatttcgatatctacaccacttggtaagtcaagtttcatcaatgaatcaactgtcttaggtgtagggttaacaatatcgattaaacgtttgtgtgtacgcatttcgaattgttcacgtgaatctttatgcttatgtggtgaacgaagcactgtataaagtgttctttcagttggtaatgggattgggccagagatagtagcacctgttctctttgctgtttccacaatcttgtcagctgattgatccaaaatacggtgttcgaatgctttcaaacgaatacgaatcttttgttttgccatgtttttccctccttcgtctattttaaaagtagactagctccgtgaaaatttttccggcacgcccgcccatggcaaagcggccgggtgtgtcgcaacctctcacatcttagctactcggtaatctttttgactaccatggtgcgcactcctgctatggaaatagcactttatctatcttacaagatacaacccgataacgcaacccttttttgctgatttatcaaagtttttcataacattttcataaatcttgtagcaagcgtcattcgtggatttctagccatgttttgatacactgaaagcaacttaaatcccctccaggaggtccttatcatgtcccataacgcacttttgattatcgactatacaaatgacttcgttgacccaaacggtgctctgacagccggcaaacccgctcagaaaatcgttcctgtaattatcgaattagctaaccagttcctagcagccggtgattacgtcatcttaccgactgatttacacgtcaaggatgatccatttcatccagagagcgccctattcccaccacataatctagccaatacttggggccatgagttttacggaccactagctagctggtacaccaagcaccaaaccgatcctcacgtctatgcatttgcaaagaatcgctattcagcatttgctaacactaatctggataatttcttacgcgagcgcgagattgacgcgttaacactgactggcgtttgcaccgacatttgcgtgctccacactgcagtctcggcatacaacttaaattacccactaacaattccagccgctgctgtcgcaacttttacaccgaacgggcaagaatgggcactcgcgcattttaaaaacagcctcggagctacaattatctaatttgacttttaacgatcatctgttatcttaaatgacgggacaatgtacccattctatataaaggagattctttttatgttaaaaacaaacacagcaattgtgctatcaatggcggtattcgctgcttagatagccagtgccgccattatttcatttagatcatcatgaaataacacactggaggcgcatcatcatgcaaacacaacaaacagcttttttaatttttcaaagccaaggccattacaaagtcctactcaatcatcaagaattaaccgcaacaatcagcggtcggtatcgccacttggcagaaagcactaacgacctgcccgttgtcggtgatcaagtaaccggcgtgatctatgatacggattatttccaaatccaaggacatctcccccggcacacgcttattcaacgacacaacagtaataagcaacaacggattcaaactttagcggccaatattgcaacgattttcatcgtaacatccgccaatcaagaattcagcgaagcgcgcttacaacgctatttaacgatggcttgggatagcggcgcaacaccggtgattgttttgagtaaaaccgatttagtcagcgactctgagctaacaacctttcttgacgccatcgcaagtgtgacattcgacagcgttcccgtcatcacaactggccagacggcatcaaatgttgcagcgactttcaaaccgtatttaacagctggacaatgggtgacatttgtcggctcatccggcgttggtaaatcaaccctgatcaaccagctcattaaagagccttccgttttaacgagcggcattcgcgctgacgatgataaggggcgccacacaaccaccaatcgacaagcctgtcaaactgctagcggggccttcatcgtcgatactcctggcatgcgcgaactcggcatgacaagtagcatgtctaaggcactcaagacagtctttactgatattgagacgctcgcacaggactgtcgatttaaggattgccagcatcaaagcgaacccggttgcgccgtacgagccgcaatcgatgcaggttcattaatgcctgaacggctagctgatttcaataaactggctatcgaagcggactatagtcaactatccgcccgcgaaatcgaacaagcaaaggttaaacgtctgatgggcagtttgaaaacacgtcctacaaaacaaaactaactcagtaagccgtgcctagaaacacaaaaagggagttacgacaaaagtgatttttgtcgtaactcccttttttggagaagtttatatgaaaaagagtttgagtttttttgccagggcggtggcaaatcgagttagcggggattgaacccgcatgaaccagtcttaatgatcaacaaatccttgcgccttcgaaagcaagtctctatcaatcaccagaaaaccattcactgttcttgggaggaatttcaaatgggccggttcgttttaccattaaactataactcattggtggtgctttacttagacggattctttagggaggaattgtctaatgaaaattcatttaatcttgcttttcaaggtaactttttccgcctaactacgcgaagacaacgatcaccttcgttgctcattatcctcgctatgttatgctcaaaagctaaccaccttgaaaagcatttttaccttttcagattatttcttgggaggaattcatctgatgtatacagaataccaaccagttatgaattaaatatgaactttcatttacgaaactgtaaaatcgcatttttacgcacaaaaaaaggactcgtcgcaatgacgagtccttttccaatcgaaaccaatcacttaagattagcggcttattggccaccgttcttcttgatgatttcttcttggatgctcttaggaacagctgagtagtggtcaaataccattgtaaatgtcccacgaccttgtgtagctgaacgtaatgttgtcgcataaccaaacatttctgacaatggtaccattgcattaacgatttgggcattaccacgtgcttccataccttcaacagcaccacgacgagcagttacttgtcccatgatatcgccaagatattcttcaggagcaataacttcaaccttcatgataggttcaaggatttcagcgccagcttgtttagcagcgttcttcaatgccattgatgcagcaatcttaaatgctgattcattagaatcgacatcatgataactaccatcatataacttagctttaacgtcaatcaatgggtaaccagctaagacaccgtttgccattgattctttcaagccttgttcaactgatgggatgtattcacgaggaaccacaccaccgacgatagcgtcttcgaattcgaagcctttaccttcttcgttaggtgtaaattcaacccaaacatcaccatattgacctttaccaccggattgacgaacgaatttaccttgtgcagatgcttgttttgtgaatgtttcacggtaagcaacttgaggttcaccaattttggcaaccactttaaattcacgtctcatacgatcaaccatgatatccaaatgcaattcacccatcccagaaataagcgtttcgcctgtttcattgttggtttcagccttgaatgtaggatcttcttcagcaagtttttgtaaagcaagatctaacttatcacgatcttcttttgattcaggttcaacagaaacttggataactgggtcagggaattccattgattccaagattaatggatgatcaacgtcagtcaatgaatcaccagttgttgtattcttcaaaccgattgcagcagcgatatccccagagaatacttcaggaatttcgttacggtgatttgaatgcatttgtaataaacgaccaacacgttcacgtttgtctttagttgcattcaaaatgtatgaaccagattgtaatgtaccagtataaacacggaagaatgttaaacgaccaacgaatgggtcagtagcaatcttaaatgctaaaccagcaaatggtttgtcatcgccagccatcaattcaacttctgaatcatcttctgggtttttagcgttataaggacgtacgtctaatggtgatggtaagtaatctacaacaccatccattaacatttgaacacctttatttttgaaagctgaaccagcgaaaactgggaagaatttcaaatcgatagttgcttgacgaatagcagctttcaattcatctttagaaatttcttcgccttctaaatatttgtccataatgtcgtcattaacatcagcaacagcttcaactaattcggcacgacgttttgtagcttcttcaaggtagtcagcaggtacatcaactgtatcccacttagcacctaattcatcttcatcatagatgtcagcttgcatttcgatcaaatcaataacgccttggaattcatcttcagcgccgattggcatttgaacagcatgtgcattagcttgtaaacgatcttccaatgttgtcattgagtaatcgaagttagcaccaagtttgtccatcttgttaacgaaaacaatccggggaacaccataagtagttgcttgacgccaaacattttcagtttgaggttcaacacctgattgagcatctaagacagtgattgcaccatctaaaacacgcaatgaacgttcaacttcgattgtgaaatcaacgtgtcctggtgtatcaatgatattaactcggttacctttccattcagctgttgtagcagctgatgtaattgtaatcccacgttcttgttcttgttccatccagtccatttgtgaagccccttcgtgggtttcaccgatcttatggattttaccagtgtagtacaagatacgttctgtggttgttgtcttaccagcatcaatatgagccatgataccgatattacgcgttttgtctaacggaaattcacgtttgtttgccataagtgaatattactcctctcgaatattaagctatatacaacaagaggccattatatgatttgaatacatataacagccaaccttgttaatcttaccagcgataatgtgcaaatgcgcggttggcatcagccattttatgtgtatcttcacgtttcttaactgcagcaccagtgttattggcagcatccatgatttcacgtgcaagacgttgatccatggtatgttccccacgtaggcgagcatagcttactaaccagcgtaaacctaaagttgtacgacgttctggacgaacttcaattggtacttggtagttagaaccaccgatacggcgagctttaacttcaagtactggcatgatgttgttcatagcttcttcgaacacttctaatggttcattaccagtttcttctttaataatatcaaatgcatcgtataagattgttgacgcagtaccacgtttaccatcaaccattaagcggttgattaagcgtgaaaccaatttagaattgtacattggatcaggtaaaacgtcacgttttgcaacatagccttttcttggcatcctgataacctcctcaagatatttaagtccttgaagtaacacacagtgtcatttaaacttcaatcgactttttcaaatttttttgtgtgttattttttaggtctcttagtaccatacttagaacggctttgcatacgaccgtcaacaccggcagtatctaaagcaccacggataacgtgataacgtaccccaggtaaatccttaacacggcccccacggataagaacaacactatgttcttgtaggttatgaccaataccaggaatataagctgtaacttcgattaagttagataaacgcacacgcgcatacttacgtaaagcagagttaggctttttaggtgtcatagtacccacacgagtagcaaccccacgtttttgtggtgctggattatctgtagcttttttcttcatactgttgtagccaaagtttaatgcaggtgcatcagactttgaagttcttgatttacgacccttacgtaccaattggttaattgttggcatttgaaggttcctccttccttgatctgaaagttatttttgagttttaagtccacacatccaggtggttctttttttacgataaaaaaatggcaacctagattgcgtggattgtaatgcatttttagacgtcagtcagcatgtctgaatatcagaaaacttccgtaaaaagcacatctacaagaatagcatgcacaactacgaaagtcaacgtgctataagccagtttttcagaaaaagttgcgccctttttttgtagttatcataaaggagatgacacgtttgttaatatattttttaacctttgttattggcgcgtgttgcgcctcttttttaactgtttgtgcttggcgttggccactcggtttatccatcacatggcctggttcacggtgtgacttctgccatcacgccctcgcttggtacgacttatgtccaattatcagttacctcattctcagagggcactgccgctattgtgatactcgaatccagcaccatttttttactagtgaggttattggcggcttgttagcgtgttgtttagccagtcaatatttcacaccacagattggctatttattgcttatcctttatttgttgagcctagtcgatattttccatacagctctatacccagttccaatggtactggcttttatgcctttgtttattgactactggccgacaaaccattggctcagtgccctattgattggcagcaccttatctgtcatcaactacttttcagatggcatcggtactggtgacattgaattattggcaattcttgggttgtggtttggattggaggtcaccctatccatgttattaattgcctgtctcctctgtttaatcaaatatctcattgatagtctccaccatccagttgtcctcgccttagtcggacgccgcccaattccatttgtcccgtatatcagctacggtgtcttaatcgttttgtttattgcaaacacataaaaaagggcctcaccatgtcggtgaggccctttaacgtgcaatttagagcaactgttctaaattggcactcagttattcttttgtttcttctttcatctgtgcttcgatgtcactgattgagtagacattttctgatacagcgccgactgtcttaggttccatatgacgatacttcgccataccagtaccagctgggacaatcttaccgatgataacattttctttcaaaccaagtaatggatcgctcttaccgcggatagaagcatccgttaagacacgtgttgtctcttggaatgatgcggctgataagaaactatttgtttccaatgatgctttcgtaataccaagcaagacaggacgacaagtagcaggtacgccaccgctaattaaggtttcgtggttacggtctgtaaattcactaatatccattaatgtaccaggtaagatttctgtatcacccggatccatgacacggactttacgtagcatttgacggaccataacttcaacgtgtttatcgccgatttcaacaccttgcatacggtaaactttttgaacttcatgcaagaggtagttttcagttgataagacgtcacggactttaattaattgtttaggatcaacagaaccacccgttaacttagaaccacgacgaaccatgtcgccttcgttaacgatgacgttggctgtgtaaggcacactatatgaacgtgtatctgtttcaccttgaacagtgatttcacgtgtatgttctgcagggttttcttccaccgcaacaacttcaccagttacttcagtgattgttgcaagccccttaggattacgcgcttcgaaaatttcttggatacgaggcaaaccttgagtgatatcttcaccgccggcaaccccaccggtatggaagttacgcatggttaattgcgtaccaggttcaccgattgattgagctgcgactgttccgactgcttcaccaacttcaacttcttcgccgttggccatgttacgaccgtaacattttttgcagacaccgtgttttgtgttacatgtgaagacagaacgaattgtgacttcttcaacaccggcatcaacaacagcttgagcaagttgttcatccattaattggttacgttgaaccatcacttcacccgttgttgggttaacaatggtcttcattgcgcaacgaccaacaagacggtcatacaatggttcgattaattcattaccttcgcgaattgagtgaatgagaagaccacgatcagtcccacaatcttcttcacgaatgataacgtcttgagcaacatcaactaaacgacgtgttaagtaaccagaatcggcagtcttaagcgccgtatcagtcatccctttacgggcaccatgggtagacataaacatttccatgacagagaggccttcacggaagtttgatgtaacaggaacttccatcatcccaccattaggagcagccatcaacccacgcataccagcaagttgcgtaaagttagagatgttaccacgggcaccagaatcagacatcattgagattgggtttgttggatcaaacgaatctgtgagtcgttgttggatatcgtctttagcatcgttccagatttcaataacgcgcgcatggcgttcttcatctgtaatcaacccacgacggaattgtttagaaaccgttgtgactttcttatgggcttcatcaacaatttcttgtttttcaggtaattgaggaacatcggcaaccccaactgttaaaccagcatgggtcgcttgaacgtaacctaaggtcttcatatcatccaataagtcagatgtccgttgaaccttatataccttgaagacttgcgcgatgatatcacttaagaagcctttcttaaatggtaagatcactggggcacttgagaggtagtcatgaatatcttcaccgttatcgatgaagtatttatctggcacaccattcatcaagttatctgttgttggttcgttcaaatatgggaagccagttggcatgatttcgttgaacatcactttaccaacacttgttaccataatcttgtggcgttgttcgtcagggaatggacgattatccatatcaacaactgacaaaccaatccgactgtgcaaatgaacgtgacctgtttgataagccattaaaacttcgtttgtatctttgaagatcatgccttcgccgagactacctttttgttcaagcgttaagtagtagttccctaaaacaacgtcttgagaaggtgtaacgattggtttaccatcttttggtgccaaaatatggtgagcggcaagcattaacattcttgcttctgcttgtgcttcatcagataaaggtacgtggatcgccatttgatccccatcgaaatcggcattgtaagcttcacaagctaatggatgaagacggattgacttaccatcaaccaggattggttcgaatgcttggataccaagtctatgcaatgtaggtgctcggttcaatagaactgggcgttccttgatgacatcttctaaaacatcccaaacatcgtcatcttgacgatcaattttacgttttgcatttttaatgtttgaagccatatcgcgtttcactaattcgtgcatgacgaatggtttgaacaattcaagtgccatttcacgtggtaatccacattgatagaacttcaatgtaggaccaacatcgataacggaacgaccagaataatcgacacgtttaccaagtaagttttgacggaaacgaccttgtttccctttcaacatgtgtgaaagagacttcaatggacggttaccaggtccagtaactggacggccacgacgaccattatcaatcaaagcatcaacggcttcttgtaacatccgtttttcgttttgaacgatgatgcttggtgccatcaagtctaacaagcgtttcaaacggttgttacggttgatcacacgacggtacaaatcattcaaatcagatgtggcaaaacggccaccttccaattgaaccatcggacgtaaatctggtggaataactggaatagcatccataaccatccattcagggttattccctgatttacggaaggcatctaagatgtccaaacgacggatagcacgcgttctcttttgaccttgtgctgacttcaagtcttcctttaattcagcaacttcgccttcaagatcaacgtcacgtaacaattctttgatggcttcagcacccatcttagcgttaaaacgattaccgtattcatctaatttttcacgatattcacgttcggtcatcagttgtttcttttctaaggctgtatcgcctggatcaatcacaacgtatgatgcgaagtaaataatttcttccaatgcacgagggctcatgtctaagacaagacccatccggctaggaatccctttaaagtaccagatatgtgttactggtgctgcaagttcgatatgtcccatgcgttcgcgacgcacttttgaacgtgtaacttcaacgccacaacgatcacagacaattcctttataacgaattcgtttgtacttaccacaagcacattcccaatctttcgtaggtccgaagattcgttcatcaaaaaggccatcacgttcaggttttaaagtacggtagttgattgtttctggctttttaacttcaccatacgaccaactacggattttatctgaagatgctaaaccaatttgcatactttcaaacttattgacatctatcaaagggccgacctcctcataatttatagcacgctttattcagcagatggatctactgcatcagcatttgctgcttgtgctttttcagcttcttcttgtgcctttttggcttcttgttctttagcgtatttagataatgcatcgatgttttcgatatcatcatcatcgtcgtccatatcgcgtaattcaatttcttgattatcgatatccaagaccttcatatccaagccaagtgattgtaattctttaaccaatactcggaatgattccggaacacctggttttggaattggttcacccttaacgattgcttcgtatgtcttcacacgaccaacaacgtcatcagacttgtaagttaagatttcttgtaaggtataagcggcaccgtaagcttcaagagcccaaacttccatttcaccgaaacgttggccaccaaattgagctttaccacccaatggttgttgcgtaacaagtgagtaaggtccgattgaacgtgcatggagtttatcgtcaaccatgtgggctagtttcatgtagtacatgacaccaactgacacacgtgtatcgaatggttcaccggtccgaccatcataaagaatgctcttaccatcagaaggcatgtttgcttcacgaacagcgtcccataaatctttatcttgcgcaccatcaaagactggtgttgcaacatggatgcctaagtttctagcagccatcccaagatgtaattcaagaacttgtccgatattcatacgagaaggcacacccatgggactcaataagatatcaactggggtaccatctggcatgtatggcatatcttcttcaggaacaacgattgaaacagtccctttgttaccatgacgaccagccatcttatcgccgacttggatcttacgtttttgtgtaatgtaaacacgaaccatcatgttaacacctggtgacaattcatcgccagcttcacgcgtaaagatcttaacgtcctggataatcccgccgccaccatgaggtactttcaatgatgtatcgcgaacttcgcgagccttttcaccgaaaatagcgtgcaataagcgttcttcggctgataattctgtcacacccttaggcgttaccttaccaactaaaatgtcgccatctttgacttcagcaccaacacggacaatcccgaattcgtcaagatccttcaatgaatcttcaccaacgttaggaatttcgcgtgtgatttcttcaggtccaagttttgtatcacgagcttctgattcgtattcttcaatatggattgaagtatataaatcttctttcactaaacgttctgaaagaacgatcgcatcttcgtagttatacatattccaagtcatgaaagcaatcaatgggttttgacctaaggctaattcacctttttccatagctggtccatcagcgataatttcatcaacatcaacgtgatcgccttttgcaacgattggacgttggttgtagttcttaccagcatttgaacgacggaatttcattaattcgtacgtatctaatgagctgtcttcacgacgaacgcgaatcactttcgcatcaacgtattcaacagttccgggatgttgtgctaataaagcaatccctgaatcgtgggctgctttatattccatccctgtcccaacaagtggtgcatgtgggtcaactaatggcacagcttgacgttgcatgttagcacccatcaaggcacggtttgaatcatcattttccaagaaaggaatgcaggccgtagcgacagcaactacttgcttaggcgaaacgtccatgtaatctaacttgtcgattgaagtttcaatattgtcatctttgtaacgtgctaaaacagtatcatcaacgaatgaaccatcatcgtttaatggtgagttggcttgcgcaatgacatagttatcttcttcgtcggctgttaaatagtcgatcttatcagtaacatcatgcgtatcccaactaacacggcgatatggtgtttcgatgaagccgtaacggttaacaacagcgtaactagccaaactgttaatcaaaccgatattagggccttcaggggtttcgattgggcacatacgaccataatgggtatagtgaacatctcgaacttcataaccggcacggtcacgagtcaaaccaccaggtcctaaggcagatagacgacgtttatgcgtcaattcgccaaggggattggtttgatccatgaattgtgacaattgtgatgaaccaaagaattccttaattgaggcaacaactgggcgaatattgatcaattgttgtggtgtcacggtgcttgtgtcttggattgacatccgttcacgaaccacacgttccatccgtgataaaccaattcggaattggttttgtaacaattcaccaactgaacgaatccgacgattccctaaatgatcaatatcatccgttgaaccgagaccttcttgtaagttaaagaagtagttcattgaagcgatgatatcagcaggaataacatgcttaatcttggcatcgatatgaccgttaccgattaagttgatttctttatcaggtgttttttgtgagtacactttgatcacttggagtgtcattggttctggtaagacaccttcatcagatggttggtaagtaaccgtcttgaagtcttctttgtctaagtatggtgccaaagcatccatcacttgacgatcaacaactgtatctttagcagcaatcacttcaccagtatcgggatcagcaagtgtttcagctaatgtttgacccaataaacgcgtctttaagcttaatttcttgttgatcttgtaacgaccaacagcagctaaatcataacgtttagcatcgaagaaacgtgcataaagtaatgaacgtgagctatcagctgtcttcggttcgcctgggcgaagtctttcgtagacatccttcaaagcttcttctgttcttgagtcgtcagtattcttatggatatctttttctaacgtcaacattaatgaatcgttgtcgcctaagatatcgataatttcttgatcagaaccgtaacctaaagcacgaactaaaacagacattggaatcttacgtgtccgatcgatccgaacatatgcaatatccttagcatctgtttcaaattctaaccatgcaccccggttaggaatgacagttgtaccataagttgtgcggctgtttttatcaacagcgctgttgaaataaacgcctggtgaacgaactaattgagaaacaattacccgttcagcaccgttgatgatgaaagtcccttggtcagtcatcaatgggaagtccccaaagaaaacgtcttgagatttaatttcaccagtttcatggtttgttaatttcaaagtaacgtgtaatggtgctgagtagttggcatcatgttgtctagcttcttcaaccgtgtatttaggttcaagaagttggtaatcaacgaattctaatgataagttaccagcaaaatcgtcaattggcataatgtcatcaaacatttcacgaagcccttcgtctaaaaaccattgataggaattagattggatctcgatcaagtttggtagttctagcacttctttaatccgtgcgtagcttctacgagtacgatgtttaccgtaattcactaagtgtcctgccaaattgttcacccctctataagttttccgcagcctcattgttacaaaaatatgacaaatattaagaaaatattacatcgccattttttgataattttgagcagaaaaaaaacaaaaacagttattttaagctgaataaatcagactaactatttttgtttttcatgaataccgtgctggacaatagatcagcacaataaatttttctacggattttcgcagttactgtataatatacttcttttactactaaaagtcaataatctgcctcggtactacttatcatagataaattgattattataaaatttagatttggcgctcaaggccttatcaacctttttcaatcccttttcttctattaatgtctttttcgttgaaaatagattagttcctaagcctaaacgttctcccttaatatcaacccccattgcggcgagcgtcgttgggaacatgtccattgtgctaaactggcgattcttggtttgaacctgacttgcttttggtgcatttaaaatcaaattaaatgcatgccgtttattggccggaatcttcttataatactccacatccatgcctaaatggtctccgttgacaatgatggtcgtattctgataaaacgactgcgtttgtgcccacttaataaattcaacaatttgatgatcagaaaaggcgataacgtttgaatactggtcaccatacttttctggcatattcggttctggatacccaccaatgtggtgcgtattctccgttagcatcgttaagttaaatggctgatctgatttgctaagctccaacgcactttccttagcgtattcgaataactttgaatcttcatagccccaccaaacataatagtcttcaggtaaccgaccatctttacgcgcagttaacaaatcatcaatttgaacattaccgtgctgcgtaaaatatgatcgtcgaccaccaaaagtcgcatccgatccaagcaagattttttgctgatagccgtgcttgtccaaaatattatttaatgacgtgacgcctggtaggaaatgattctttttatctgtcgcataggaattcccatccaccggcactttcaacggtaatcctgatgtttgggcgaccattcccgcaactgtccagcctgttcctggtaattgttgggcaccaccaaatgatcggttagaatttgagaagtgaacaccctcttgctcagctaacgccgtcaattctggtagtaaattggttttcatctgcccacccatttctcttgatgttgctgtagattcgagtgactcagcataaatataaattagatttcgtttttgttttgggaacgttaatttggttttattcggtgctacataattttcttcaataaatggtgaattcgccgttagatattcgtaaaaaccaacagcatcaattttaatcgcagcaaccgtcgtcaaaccacaaaacaataacgcactgaccaatacaaatcgttttgccttgagttctaagtggtgtgttattttatgagtgaccaacagttgcaagtgtctgatatagttgcagaacaaaaaaacgctgattaaacaagtaatggcacctagcaccggaccgccgataaatgaattaataaaaccatcgtcaacacctgtcatcggttggcgtaagttataaactatctgctcgggcgttaacaagccaaaatttgcctttgtccaaaaactagctgacaacaagaaatacccaactgatattaataaggcaccactaaaaatccaccagctaaaccaatgtcttgtgcgtgtgactggtaccagttcaaatattaaccatttttggcgccaccttcttgtcaccaacacgacgccttgaataatggtaatcaacataataaacttgagtaaaaataacttttggaacaaaccatcactaaaatgaataacatgaccagtcaacccaaaagtcactaaaatcgttaatcctaatacaagcaccaaattgatcaacataccaactaattgaataaattggcgatcattgcgttggacaatagcacataaaaaaggtaaacagacaaacaagtagatcatcgcaataaataacattatgtatttgctccatttctaactatctcatttaatcatagcattttatggctgtatcgcctacccacccttttaacaaaagtctctaatgacaatcttcaagcccctcacggaatcatttacaaactcgcgacttatcatttacgttttttacacgaattagcggtcaatctttacacgacgtctctatactgaacttgtacccttaaatcagtcctcaggaggaatcattatgaaacgcattagtatggcattactcacagttggtgcggccgctcttttattagctggttgtcaaggccaatcaaaaagtgcaagtcaaagccaggatcaaggcgctaaaattactgcagttggttcgacagcccttcaaccccttgttgagcaagctggcgatcaatatcaaaaggataaccctaaagtcaacgtcaccgttcaaggtggcggttcaggaactggtttaacccaaattagtggtggcaacgtcacaatcggtaactcggacatcttcgctgaagaaaaagatggtatcgatgctaagaaacttgttgatcacaaagttgctgtggttgcaatcgcacccgttgttaataaaaagttaggcatcaaaaatttaaccagtgcacaattgctaggcatctttaaaggcgaaatcacaaactggcaatccgttggtggtcctaacgaaaaaatcaccgttatcaaccgggcccaaggaagtgggacacgtcaaacgtttgaaaaattaggtcttaaaaccgacaaagttgttaccagccaagaacaagattcctctgggactgttcaaaaaatcgtcgaacaaacgccaggcgctatcagttacctcgccttcccatacatcaaaggtaacttgcaagccgttaagttaaacgacgttgagcctaccgaaaagaacgtttcaaccaatgcatggccaatctggtcttacgaacatatgtatactaagggcgcacctaactatcaaacagcccgtttcatccacttcatccaatcaaaagacgttcaaaagacaatcgtccctaaactgggctacatcccaatgacgcaaatgaaagttgagcgccacgttgatggcaccatccaagatcaatagtttccagaagtcgcgctaaactgcgcgactttttaattggtatatactaataaaaagcttttaaacaaagtaatttgcatttatatttatgattggtataatcgaactattagtttatcaaaggagtttggtgaatgattaacaataaaatgaaaacgttatccgaaaaataccccactaaaatggcaattacttccgaaatcatcaacttaaaggccatcttgaacctccccaaacccactgaagccttcatgagtgatttacatggcgaatatgatgccttccagcatctcattcgcactggcgcagggaatctccggcaaaaaattgcagaggtcttttccggtgaaatgactgaagacacaatgcaggcgttcgcttttttagtttactacccaaccgagcggcttgcactcaaacacgcacaactatctgctagcgaactcgatcagtggtacctcaccacttttaaacggttaatcgacctcttaaaatttgtctccacaaaatacacacgctcaaaagtccgtaaagcaatggcgcccgatttcgtctacattaccgaagaattaatgtacggcgatgtagctaacagcgataagaaacgctacttccaagaaatcacgacgtccatcatttcgatgggccaagccgatgccttaattatcgccaccagtcatacgattcaacgactagtggttgatcattggcatatcatcggtgacatttacgatcgtgggccgcgtcccgatctgattgtcgaacaactcaccaagctccccgcggttgatattcagtggggcaatcatgatattctctggttcggcgccgctagcggttctcaactatgtatgctcaaccttttacgcatttgcgcacgctacaataatttagccatcatcgagaaagcttacggaattgaccttagcgaactggttcagtttgcccaacgaacttatcagcccaatcccgccttcgaaccaaaggttgctgccaatcaacccgcaatctcaacagctgaaaagaaaagcatcaaccaagtgcaccaagccatcgccatcatgcagtttaagttggaacaaaccgtgattaaacgcaatcctgatttcaaaatggaccaccgcttaaccctcagccatgttgactttgaacagcagacaattcatctaaatggtcatgactacccacttgataacacctgctttcaaacagtcgaccccacccacccagaaatattaacttccggtgaagcagccattgttacatcattgctaaacgcgtttacccactgccaaaaactacgcaagcatctgcgttttttaatcgacaacggtagcatgtaccaactctacaaccagaatctcctttttcacggctgtattccagttgatgaagccggcaacttcctcacgttaaccctcgctaaccgacaatacgctggtaaatcattactcgacttcttcgatcaccaaattcgaatgagcttcgaccacccgctcaatcaagataatttatccaccgatttactctggtacctgtggacaggaccgctctccccactatttggcaagaacgcgatgacgaccttcgaacgctacttcagcgccgaccccgttttacacgaagaaaagaagaacgcatattaccaactccgccatcaggaagacttcattgagaaactcttgttggagtttggcttaacgccagaaacggggcacattctcaatggtcacacacctgtcaaaaaaggccacaatccaatcatggctaatcgcaaaatgatcgtgattgatggcggcttttcaaaagcttatcaccacacaactggcattggtggctttacgctcctgtacaattcgtatggaatgcagttagtcacccatcagccgttcaccacacgagccaatgcaattgccaagatgcaagacattatttccacgcgtcgagtgattgatcaagttagtcaacgtcaacgtgtcagtcaaacgaatatcggcgctgcgattaaaactgaaattgaacagctcacgacccttttagggcaaaaaaataaggtgtcagaccaattggtctgacaccttatttacgtttaaacagttactttatcagtcttactggtaatggtaattttacctttagttgcgccaattgtcaccggtacacccatcgtaatctcgccagcaagcaacgcttcactcaactgatcttctacttgggtttgtagcgcccgtcgaattggtcgtgccccatattcaggatcgaacccagctttggcaacaacatccatcgctgcagctgtcatcttgatttgaatcccttgttccgctaaacggcccaagacattcttcgccataatcttcacgatttcgcgcaattcaggttgtgttaaggaatggaagacaaccgtttcgtcaattcggtttaagaattctggacggaaagctttcttcaattcttccataatgcgcccttgcattgctttataatcagcagttacatctttaaccccgaacccaacggatttatcatcacgtaaggctgtcgcacctaagtttgatgtcataatcatgatcgtattacggaaatcaaccttacgtccttttgaatcggttaaatagccgtcatccaagacttgcaacaagatattgaagatatcagggtgggccttttcaacttcatcaaataaaatgacggaatatggtttattgcggagcttttctgttaattggccgccttcttcgtagccgacatagccaggggccgccccaactaaacggctcgtgctgtaacgttccatatattcagacatatcaacccgaatcaagttgtcttcagaaccaaacatggcttccgccaatgctttggctaactctgttttaccaaccccggttgggcctaaaaacataaatgaaccaattggtcgttttggatctttcaaaccactgcgcgcacgacgaatcgcacgtgaaacggcagaaatggcttcttcttggccaacaacccgtttatgcaagactttttcaagttgcatgagacgttcgctttctttgcgttgcaactgagtaacaggcacaccggtccattgcgcaaccacttgagcgatgtcttcagcagtcacttgaatgtcactgcgaacaccgttttcttgttcggcagcttgtaacttggcaatcttggccttagtggttacttcttgctcatgaatcgtcgccgctttttcaaaatcttgcgcgcgaacagcggcttctttatcgtcatttaaagtttgtagtttttgttctaatttatccaacggtgtcttctggttaacagcatccaatcgcactttagccgtcgcttcatccattaaatcgattgccttatccggtaagaatcggttcgtgatgtagcgatttgataagacaaccgcttcatgtaaagcttcatctgaaattgcaatcccatgatgagcttcataacgtggacgtaatccctttaagatttgttccgcatcttctggcgttggttcattgaccgtgacggtcgcgaatcgccgctctaaagctgcatctttttcaatgtacttttgatattcatctaaagtcgtcgcaccaattaattgtaattcaccacgcgctaatgctggtttcaagagattagaagcatcaattgccccttcagcgccacctgcaccaatgagggtgtgtaattcatcaataaagagaatcacttgcccatctgcatagatttcatcgataatcttcttcaaacgatcttcgaattcaccacgatactttgtcccagcaaccaatgaccccatgtcgagcatcatgagccgcttttgctgcatgtcacttggcacatcgccattgacgatgcgttgcgcaaaaccttcagcaatcgctgtcttaccgacaccaggttcaccaactaagacgggattattcttcgaacgccgggctaaaatctgcacaagtcgccgaacttcttcatcacgacccacgaccggatcaatttgattgtcacgagcaagttgtgttaaatcgcgcgctaattggttcaacgttggtgtcccagcttgatcggcattattcttagctgctttagcccgttttttagcggttgctgtatccacacccatcttttgaagtagtagttggcgtgttttagctaaactaagtcctaagttcaataagatccgcgcagcgataatatcatcatcacgtaaaagtgctaataataggtgtgctgtgccaattttaaccgaattagcttgttgcgcttcaacccgagcaatatcgagtacttgtttggctttgggcgaatatggtaaataaccgctaatgccagaagcgattacagcatcgccatatccggttaagcgttcaatttcttcaaggacatcggtcgaattgacacctaattcgcgtaaggtagtcccagcaattccctcattttctaatacgattgctaataggagatgttccgttcctagtgcatggtgattaaatttctttgcttgttcttgtgccatcattaagacgttttttgcacttggtgtaaatagattattcatggataatcccccactctttacttaatttcatatcgtagtcgttctaacactgcaactagaatctgtgctcgaagctgctcttctaattgtttattattaaccgctaatgtctgtggactcgttgccgcgagtatcaaattgccttccttttgcgaaagaatttgttcatcatatagtttctggataatggctaaggtgtccgcctgggaaatctgcgtatcaacattttcaattaacgcttctaaaaagtcccgatcatcgagaaattgaaccttgacgatccgaatataaccaccgccgccacgcttactattcacgacataaccgcgctgctcagtgaaccgcgtattaatcacatagttaatttgggacggcacacaattaaaaagcttagcaatttcggagcgtctaatttcgatttgttcattgtcagccagtatcttttttagataggcttcaataatatccgagatgttctgactttgcaaacatatcagccccttcatttagtcttctgcgtttttcagtgtcaaaagtttaactttgactaacgttgactattattataacgattatcagtacaaaatgaaagtttactgacttttagtagctaatcaattggacgcacaaaaaaagacttgtcatcaacaagtctttgagagtcgggaaaacaagatttgaacttgcgacccctacgtcccgaacgtagtgctctaccaagctgagctacttcccggaaactattttattacgggtacaaaaaaagcggaagacgggattcgaacccgcgacccccaccatggcaaggtgatgttctaccactgaactacttccgcattttttattaatatttttgtatccagtcgggaaaacaggattcgaacctgcgaccccctggtcccaaaccaggtgctctaccaagctgagctatttcccgttatatgcacccagtaggagtcgaacctacaaccttctgattcgtagtcagacactctatccagttgcgctatgggtgcatttttcattatgatgccgaggaccggaatcgaaccggtacggtagtcacctaccgcgggattttaagtcccgtgcgtctgccagttccgccaccccggcttaatcataatgaaagcggaagacgggattcgaacccgcgacccccaccatggcaaggtgatgttctaccactgaactacttccgcatcttaatgccgactagacgattcgaacgcccgaccctctgattacaaatcagatgctctaccaactgagctaagtcggcataataagataactttcattgaatattcaattgaatgcgggtgaagggacttgaacccccacgtctatatagacactagaacctaaatctagcgcgtctgccaattccgccacacccgcattttggcgtgtaacttggccgatgagtcgtgacaggctcgaactgtcgaccctctgattaaaagtcagatgctctaccaactgagctaacgactcaatggaggttacagggctcgaacctgtgaccctctgcttgtaaggcagacgctctcccaactgagctaaacctccatcaataaaaagcgcggcaacgtcctatcctcgcaggtagtttcccaccaactactatcggcgctaagaagcttaacttctgtgttcgacatgggaacaggtgtatccttcttgctatcgccaccacactattttgtgcttgcgcactgagaagaacttcgttctctcaaaactgcataataagtaatatttcatttcaaaagcctaacattgcacctttggttaagtcctcgaccgattagtactagtccgctccatacatcgctgtacttccactcctagcctatctacctgatcatctttcaggggtcttacttccataaaggaatgggaaatctcatctcgaggggggcttcacacttagatgctttcagcgtttatcccgtccatacatagctacccagcgatgcgcctggcggcacaactggtacaccagaggtatgtccatcccggtcctctcgtactaaggacagctcctctcaaatttcctgcgcccgcgacggatagggaccgaactgtctcacgacgttctgaacccagctcgcgtaccgctttaatgggcgaacagcccaacccttgggaccgactacagccccaggatgcgatgagccgacatcgaggtgccaaacctccccgtcgatgtggactcttgggggagataagcctgttatccccagggtagcttttatccgttgagcgatggcccttccatacggaaccaccggatcactaagtccgactttcgtccctgctcgatttgtcaatctcacagtcaagctctcttatacctttacactctacgaatgatttccaaccattctgagagaacctttgagcgcctccgttacactttaggaggcgaccgccccagtcaaactgcccacctgacactgtctcccgccacgctaagtggcgcgggttagagtggtcatacagttagggtagtatcccaccaacgcctccatcgaaactagcgttccgatttctacggctcctacctatcctgtacaaactgtacaaacactcaatatcaagctacagtaaagctccatggggtctttccgtcctgtcgcgggtaacccgcatcttcacgggtattataatttcaccgagtctctcgttgagacagtgcccaaatcattacgcctttcgtgcgggtcggaacttacccgacaaggaatttcgctaccttaggaccgttatagttacggccgccgtttactggggcttcaattctgggcttcgcttacgctaactcatcctcttaaccttccagcaccgggcaggcgtcagcccctatacgtcatctttcgattttgcagagacctgtgtttttgataaacagttgtttgggcctattcactgcggctgacctgacggtcagcaccccttctcccgaagttacggggtcattttgccgagttccttaacgagagttcactcgctcaccttaggatattctcctcgaccacctgtgtcggtttacggtacgggtagtttatttctcactagaagcttttcttggcagtgtaacatcaggaacttcgctacttaatttcgctccccatcacaacttgtccttaaagaatcaagcatttcactcaactcaagacttgttgcttagacacacatttccagtcgtgtgcattccttagcttcctgcgtccctccatcgttcaaacaaaataaactagtacaggaatctcaacctgttggccatcgactacgcctttcggcctcgccttaggtcccgactaaccctgggaggacgagccttccccaggaaaccttagtcatacggtggatcagattctcactgatctttcgctactcatgccggcattctcacttctaagcgctccactagtccttacgatctagcttcatcgcccttagaacgctctcctaccgcggacacttacgtgtccacccacagtttcggtattatgtttagccccggtacattttcggcgcagcggcactcgactagtgagctattacgcactctttaaatggtggctgcttctgagccaacatcctagttgtctgtgcaccgccacatccttttccacttaacataaattttgggaccttaactggtgatctgggctgtttccctttcgactacggatcttatcactcgcagtctgactcccggaactaaatcaatggtattcggagtttatctgaattcagtaacccatgacgggcccctagtccaaacagtgctctacctccatgatccaatattccgaggctagccctaaagctatttcggagagaaccagctatctccaagttcgattggaatttcaccgctacccacacctcatccccgccattttcaactgacgtgggttcggtcctccagtgtgttttaccacaccttcaacctggacatgggtaggtcacttggtttcgggtctacatctatatactcactcgcccatttcagactcgctttcgctacggctccagcttttcactttaacctcgcatataaacgtaactcgccggttcattctacaaaaggcacgccatcactcattaacgagctttgactaattgtaggcacacggtttcaggatctatttcactccccttccggggtgcttttcacctttccctcacggtactggttcactatcggtcactagggagtatttagccttgggagatggtcctcccggattccgacggaatttcacgtgttccgccgtactcaggatccagaacggaggttaagttgtttaatctacgtggttatcacactctttgactcagcttcccagctgattcgattacaacttaacttggtaactccaatgttctgtcctacaaccccaagaagcaagcttcttggtttgggctcttccccgttcgctcgccgctacttagggaatcgatttttctttctcttcctgcaggtacttagatgtttcagttccccgcgtctaccttcattaagctatgtattcacttaatgataatacccgactaaaggtattgggttcccccattcggaaatctccggatcaaagcttacttacagctccccgaagcatatcggtgttagtaccgtccttcatcggctcctagtgccaaggcatccaccgtgcgccctttataacttaacctaactttacctacggtaaagggttattatttgagtttagcgatatgaactaattcatatttctattaaaaaactctttaaaacgcaatgttttctcggcttttaaaactaatatattacttattatccagttttcaaagaacaaagtttcgatgactattgtcatcaatggaggataacgggatcgaaccgatgacctcctgcgtgcaaagcaggcgctctcccagctgagctaatcccccgtgttggtactatttaattcttagtacaatgggcctaaatggactcgaaccatcgacctcacgcttatcaggcgtgcgctctaaccagctgagctataggcccaaaaaacgtcctaattcaatgagagtagacctctcaaaactaaacaaagtttcgacttcgcaaatgtacaaggttttccgtattattccttagaaaggaggtgatccagccgcaggttctcctacggctaccttgttacgacttcaccctaatcatctgtcccaccttagacggctggctcccgaaggttacctcaccggctttgggtgttacaaactctcatggtgtgacgggcggtgtgtacaaggcccgggaacgtattcaccgcggcatgctgatccgcgattactagcgattccggcttcatgtaggcgagttgcagcctacaatccgaactgagaatggttttaagagattagctaaacctcgcggtctcgcgactcgttgtaccatccattgtagcacgtgtgtagcccaggtcataaggggcatgatgatttgacgtcgtccccaccttcctccggtttgtcaccggcagtctcactagagtgcccaactaaatgctggcaactagtaataagggttgcgctcgttgcgggacttaacccaacatctcacgacacgagctgacgacaaccatgcaccacctgtcactttgtccccgaagggaaagctctatctctagagtggtcaaaggatgtcaagacctggtaaggttcttcgcgttgcttcgaattaaaccacatgctccaccgcttgtgcgggcccccgtcaattcctttgagtttcaaccttgcggtcgtactccccaggcggagtgcttaatgcgttagctgcggcactgaagggcggaaaccctccaacacctagcactcatcgtttacggcatggactaccagggtatctaatcctgtttgctacccatgctttcgagcctcagcgtcagttacagaccagacagccgccttcgccactggtgttcttccatatatctacgcatttcaccgctacacatggagttccactgtcctcttctgcactcaagtttcccagtttccgatgcacttcttcggttgagccgaaggctttcacatcagacttaagaaaccgcctgcgctcgctttacgcccaataaatccggacaacgcttgccacctacgtattaccgcggctgctggcacgtagttagccgtggctttctggttggataccgtcactacctgatcagttactatcaaatacgttcttctccaacaacagagttttacgatccgaaaaccttcttcactcacgcggcgttgctccatcagactttcgtccattgtggaagattccctactgctgcctcccgtaggagtctgggccgtgtctcagtcccagtgtggccgattaccctctcaggtcggctatgcatcacggtcttggtgagcctttacctcaccaactaactaatgcaccgcgggtccatcctaaagtgatagccgaaaccatctttcaaccttgcaccatgcggtgctaggttttatgcggtattagcatctgtttccaaatgttatcccccactttagggcaggttacccacgtgttactcacccgtccgccactcactcaaatgttatcaatcagaagcaagcttcttcaatctaacgagagtgcgttcgacttgcatgtattaggcacgccgccagcgttcgtcctgagccaggatcaaactctcgattaaaagtttgtagctcttgttttgttacttaatttatttgctagcgaaattgactttgcaaatatgttttgtgccccgaagggcgaccctacacatttggtttgtcgaaactttgttcagttttcaaaggtctacatcagatattagttaatcactcattaaattaaaactcataagcaacacaatctatcttatcatgtataaacccgaatgtcaacaactttttttaagtaatattcattcaacgttttgctacatgctcatctctcgacgacatagaatatcttaccatcctagtgggacaacgtcaatcactaatttgaaaaaaattcaaaaaattgaattcctgtataaatatcgaaaaaataattcatatcacccggattctcatccctaatctgcgctattgattatccctcataatacttttaaactgctatttgttccaattttatccaaattggtataggtaaacaaaaagatcctgcaaaattcgcagaatcttcacgtcctaatagaagtcttctaggttttcatagtctaatatcgcaatctttcgaccgtttcgttcaattagcgcatgactttctaactgttttaacttacgcgataaggtttcaggcgttgttccaatatatgttgccagttcttttaacttcatcggaatcatcacttcagtttctccgctcgctttagctaaatcaagtagataagtcacgattctggattcaactgactcgatattgattaagttcgcctgtttttccaaacgcgtcatcttatcagtagttgcttctagtaactttaaactaatttcgggataggctaacagtaactgttgaaaagcactccgcgataacgtacagattgtactatcttgcaagacctcaccgtacaacggctcatcttccgttttaaaaagtaacttttctccttcaaaatcaccgggttccatcatgcgtagcagttgctctttgcctgctgtagagagctgatagaccttaatgctccccttagctaagatcactaaccgcttctgatccatcgggttcatcaccaacgtcccttttttaacgcgttcatgatgggtaactgccgaaatcttgaccaaactatcacggtctaaatgattaaaaatcggtactatctcagcacaaatatgttgttcgtcagtcacctagcccacttccctctatcttaatcgtcgtcttcttcatctaatccttcgcgcgctgcttttcctagttggctttgcaattcacggatttggtgttggttgtagcccattaaagaaaccatatccgccgctaaagcaaatcgttcttctttttccgcaagtttaatcgcacgggaaacaaatagattagcagtattatagtccgcaaccatttccgcaatcatcgctggcatctcccagtacttaatccgcggctcttctgtcagcatcccatactcggtatactcagcttgcgtcgtcggaagcacttcaccttcgtctagtagccgttcggccgtcttgtctaatagcatatcattttctgcaagcaatgtggttaattgcgctttaaaagcttggttattgattcctttagcgtaccacttcatttgacggagtttacgccgttgaatcgttaagttagccatcacatggccgatcatggcacccgcggttggtgtatggtgatcaacatcagcttgtttaacttctgcttggtaacgtgtttcgatttcttcattagataacatattaattgccccctatttcactttgatactttgaacgctgtagcctaagtcagttacagcttgtgttaattcatctgggtttgtcacggcttcatcatattctgctttcactttactagcattaaagagaactttcactgattcaaccccatcttgttgactgacacccgcttgaatcttttgcatacatgacggacatgatagctcgtctaattgcatcaccaattttgccatttcaatgaccaccttttcgtttgattactgttactatatcgcgcgctgcatgattaaaaattgaccgccatcaagtttagcgaactttaaaccgaatcaggcgcatcgcattgaaaatcacgaccagaatactaatctcatgaacaaacatcccactagccatctgtacccagccaagcatcaggccaagcaataacaatccgaccgttccaacagcaatcacaatattttgaactgtattacgtgccgtcgccttcgtgaggtaatcggcatacactaattcggataacgtcgattgcattaacacaatatccgaagtttcaatcgcgacatctgtcccagaacccatcgcaattccaatgtcagccagtgcaagcgaaggactatcattaatcccatccccgataaaagccactttttgaccgtttgcttggtaggtcttaatgaattcaaccttctctgccggcaaaagattcgcgtggtattcagtaatcccgacggctttggcaattgctgcggccgtctggtcattatcgcccgtcaacatgactaaatgtttaacgcccgcttttttcaaacgcgttaatgctgccttggcttccggtttaacagtatcagcaatcccaattaataaaacaacttgttggtcaactgcgactaatacggttgattgccctgctgtttgactggccgtgatcgccgcaatctgcgcaccggttaaccggatccctgcttcagtcatcatcttggcccgcccaatccgaattgtttgaccagcgacttcagcttgtacccccaaccctttgagcgtttcaattcgttcaatagttggtaagtctgtcaccccttgttcccgtgcatactgcacaatcgcagtcgccagtggatgatctgactgtgcttcaaccgcggtagtcactgccaacgttgcttgttctgccgctgtataaaattgcacatgtgcaactgccgtgtcccctttagtcaatgttccagttttatcaaagaccatcgtatcaatgccagccatcgcattaacgacttcgccgcctttaatcaaaaccccatgcttcgcgccattgccaatccccgccacgattgaaactggcgcaccaattactagcgcacctggacaaccaagcaccagaatcgtaatcgcgagtttaaagtcgcgcgtgattaagccaatcgctaatgccaacactaaaacggccggtgtgtaataggtcgcaaaacgatcaatgaatttttccgcgggtgacttactatcttgggcctcttcaaccaattcaataatttgggcaaaagttgtatcatccccaacctgcgttgcggtaaccgtcaatgtcccgttatccacaattgccccggaataaacagcatcacccactattttcttaacgagttgtgcttcgccagtgatgctagcttcattgacataggcactaccttggacgacttgcccatcaaccggcacctgagcgccagctttaaccaatacttgatcatcgatttcgacatcatcaacatctaccgtcgtagtagtgccatcggccgctaacacttgtgccgtttgtggcgccatttcagacaatgcgcgaattgattctcgtgtctttttcaaggttcgttgttcaagatagctcccgaataaaaagaggaacgtgacaatcgccgattcattgaactcaccaatgattagcgctcccaataccgcaatcgtgaccagcaaatcaatgctgatgactttcacttttagcgcttgatacgcctgcatcaaaatcggtgcaacccccatcattgacgcaaccaataacagcccttgcatcacaattaccgccccaccaagccaataccagccataggccactgcaatcaatccgccaacagtcagcgcaatctgattcttcacggattgtaaccatctttgaaatttcatttaaaatcccttcttcctaacgattgtctttagtatagaagaaagccgattttaagaacttgatggttatcaagtttacccgaatataacagacaaaaaagcacaatcaacgattgtttcgtcgattgtgctttttcaattcgattaggcttcaaacccattttgatcagcgacttgcttgaaccaatgacctgattttttaatcgtccgttggcaatcatggtctaagtccaccgcaataaaaccgtagcggttcttataggcgttggtccatgaccagttatccatacacgtccacatatgataaccgagacagctactcccttcttggagggcttgatggacatacttcaaatgatcctgtacaaattcaatccggtagtcatcatcaatctggccatcggcattgcgataacgttcttcgccttcaacgcccatcccgttttccgaaatgaagcaagcaatgttgccgtaattttcgcggacgttctttaaaatatcgtaaatcccacgttcgtagatttcccacccgcgatacggattgactttcttacccggcatatcgtaattgtcgaaaaaatcatccggcatcgggccgtttgtatggtcgattggggtttccttggccttcacgcgccgtggttgataataattaatccccaataaatccacagtattcgccttaatcactgccaagtcagctggttgatagtcgggtaagatggctagatcttttaaaatcgcgaccaaatcagcggggaattcccccttcacggcaggatctaagaatgaacggttgaaaaaagcatctgcaacttgtgcggctttcacatctgccggattagtcgcatcccgaggataacttggggttaagttaaggataatgccaatttgtcccccttgattgcgtgcgtgatatttttgaatcgccatcgcactcgctaatgtttcgtgataaccaacttgtaccgcatgcgctaaattaatttcagctggataatggaactgatataaatagccgccttcaaccggcacaatcggttcattgtgtgtgaaccatttcttcacccgatccccaaataattcaaaacaggtttcagcataatgaacgtaagcatcaatcgtctcacgattgagccaaccaccttttttctggagtgctagcggcatatcaaaatggtataaattcataaacggttcgatgccgtttgcgattaattcgtcgatgtacgcattataaaaatcgacagcttgtagattaatctcccccgtaccttgtggaaacaaccgactccattgaatcgatgtccgaaaactattgtgtcctgtttgtttcatcaattggatatcacttttgaattgttgatacacatcagaggtccgcgctgggcccacttggttaaaaaacttttctggcgcttgttgataccaataatcccaaatattatcgcccttaccatcaccgtcaatccggccttctgtttggggaccacttgctgctgaaccccaccaaaaatcctttggaaagtcataaaaagtcatcgctagcactccttcttgtttgaatagcctcagtatatcagcttctttttaaaaaaccaactcttttatttaaatgtatagacttttcaaaaagagcgtgctatattgagaatgtaatcgattgcaaacacatgtaaaggacggtgctctacgtgaatacttttatggacacgcttagcaagaaaatcatgcctttcgcaaataagttaggccaaaatcgttacctaactgttctacgagacgcatttatgctttcattcccattgacgatgtttggatcaatcatcgtcgttatcactaacctgccatttttcaacgatgccaccaaagcgaccctaacggaactccttggtaatggacaaaatgccacaatgtcaatcatgacggtcttcgtcacattcgggattggttattatctttctaattcatatgatgtggacggaattttcggcggtgctgtttcattcgccagtttcctaatcctcaccccattcatgatgaccaccgataaaggcgttgacgttagcggtgttttaagtctcgatcgacttggcgctaaagggatgttcattgggatgattgcggcatttatcgctgcagaaatttattgccggattactaaaaaaggctggcaaattaagatgccagacggtgtcccacctgcagttgcgaaatcattcgccgctttaattccagctattttaaccttaaccattttcttagtcattcaagcggcagtcactggtttattccacgtaaacttgcacgacgtgatctatgaaattattcaaaaaccactcgttggtttaggtggcagtcttcctgcaaccctaatcgcattgttctttgtccaattgctctggttcttcggtcttcacgggcaaattatcgtcaactctgtaatggatccgatctggaacacattaatgctcgaaaacttggaagcttacaaagctggccatgctttaccacatattgtcacgaaaccattcatggaaactttcaccgtaggtctcggtggttctgggatgacattagccgtcgtcttactgatggcctttatcatgaagaaaaaacaataccgcgatgtcggacgtttggccttggcacccgctgtcttcaacgttaacgaacctgtcattttcgggttcccaatcgttttaaacgccacaattttcattccatggctgattgcaccactgattgtcacagcgctcaactacactgtaatggcaatcggattggtgcctacgccaactggggtttcagtcccatggaccgtcccaatcttcttcagtgggatgctcgcaaccaactcagtactcggcgggatcttacaactcattgacgttgtgctagtcggtctcatctggttcccattcattaaaatgctagatcgccaaaaagaccctctcgcaaactaaagattgttttaccccgttgtttccactaaactataagtagaaagcggggtattttttttgccaaaatacgaagaaattgccaacattattcgacaacggattaaacaagggcgctatcctgctaatacgttgttacccaatcaaaccgacttagttcaagaattcgatgccagtcgaatgacgatcaaaaaagcaatcacgattttaacgatggaaggactcgttctatcacgacgcggcgctggtacaaaggtgttagaccactctttttggaataaatcaacggcaccggcggatcaataccgtgggatgtcacgtgacttagccgacattggtaaaacactctcaagtaagatcatcacgtttgaggtgactttcccaacacctgagattaaagagcgcttaatgcttgctgatcaacagcccgtctacaaaatcattcgactgcggattatcgacggcgttaatagcgtcctcgaacatacctacatgccagtgagcctagttcccggattaactgatgatgttctcgcacagtcaatctacacctaccttaaggagaacctacacctcacgttcgcgggcgcctttcgtaatattcaagccgataaggccgatgaatatgaccagcaatatctggactgcgccccaactgatcccgtcttagaagttgagcaagttgtttatctcgataatggccaaccgattgaatactcaagaagccgcaaccgttatgatcgccgcggttatacattcttagacgttaagaatacttaattgcactaaaaaaagcctgccagcatttagctgacaggctttttctattgattatttttcgacatcttgtaatttttggttgtcgtctaattgtgagcgaccaccgttgccgattttttgtaaatgattcattcctaaccataatagcaagagtgctacgatgatgaaggctaagagaacaaagaatgattgaacaatttgaccggtacctaaaccagatgtaattgcttctctgagccctagaattgaatacgtcattggtaagaatgggtgaatgacgttgtagaagtggttcgtgatttccattgggaatgtaccacctgaaccccctaattgaagcatcaagaggaccattgctaagaaacgaccaggattatcaaatgtcattgataagaacataatgatcgacatcgaagcaagtgagaaggtaattgccattaggaagaattgtgctggatgatcgacgtttaatccagcaaccatcattaaggcaggttcgataattgccatcccgacagcgactaaagcgccaaccgtgattttacttaagaaccatgctgttgatgattgaccagtcattgagatcttccgaattggataagcaaagttgaagacaattgcgccaacgaacaatgctactgaaaggacgtaaggtgctaaggcatgaccgtagttaggcacatagctgtaatttgaatgtttcaattcagcaggtgcagcaaacatatcggctgtcttatccgttaattgaattgagttaacttcatttgcaccagatttcaatgcagatgctaatgtcttattaccatctgttaattgaccagcaccatctgttaacttagctgagttatccgttaattgatttgtaccagcagctaattgatcaacaccgcttgttaacgttggaatttgaccatttaattgaccaagaccattgttcaaggctgttgaaccagttgctaattgactgataccacttgtcaattgaggtacttgggcatttaaagcaccagtaccggcagcaagttgttgtccaccagctactaatttagagctttgagctgttaattgaccaacaccgcttgttgctgatttaacaccgtcagtataaccattaattcctgttactaaggtattaatctgtggtgtcatcgttgattgactagcaatccccattactttattactaatttctgcttttgaagttaattcagctgcattaattgctggcgtattattaggaccatttacaccttggtttaattgcgttgcaattcctgttgcttgagttgatgcagcattcaattgagcgataccagctgttaattgttgcatttgaaccattaagccagaaatttgatctcgcatttgttgattcgttaatgcgtcactcattgttaataattgttgtgacttcgtacttaattctgttagttgagcaacagcgttatctaattgacccatttgaccaagtaatggcgttaattggttaatcatccctgttatttgtccaacatttaattgttcacttgctgcagcaattgtttgcactgaagttaagtttgaacctgccttagcctgaatatcttgtaatgctttttgacttgcaggacttaagttagctgaatctgcactaattgtttgtacgtcagctaatgttgtctgcgagttaccagcaattgtattagctgaggtattcaatgttgtttcaaacgctgataattgagaacttaaagctggcaattgagctaacgctgctttattttctttataggcattatctaattgaactaataccgccatacttggttgcaattcgtttaacattgttgctaactgtttagattgtgcgttaacactcttcatcgttgcaggcatttgggcaaatttttgcattaaatccgtttgattgcttaattgagtattaatttgaccaattccttggttcatcactgaatttaaaacatataagcctgcgacaccggcgggaagttggcttgttgaagatgccaaacttgtggcacccgagctaagttgatttgagaagccattaagcgtgtttaaaccagtgcccaacgcgccaactccgtttgtataagctgtaacaccactactaatttggcttgcaccatcattcaattggcttgcgcctgatgcgagtgcacccgtcttgctatctaataatagtaagccgttgttaagtgtgtttgagccatcagctaattgtttaacaccatctgataatggcacaacgcttgttttcatcgtcatgataccatcgttgacttgagcaacaccggctgtataaacatttaaaccatctgataacgttacagaaccgtctgttaattgtttagcacccttggcagcagtactgaaccctttaccggcagtcttaacctgtttgaacatcactttagcgtaagcatttgtgacagtttcccgaacttgggcgttcaattccttggcacccatttcactgataacttcaccgatgaagttcaatgaatcgttggttttgtattgaatttgcatcttcttaggattcttatccaagactgtagcagcattggcagagaagttcttaggtagggtcactacagtgtagtattccttatctttaagcccttgttgtgctttttttgctgatacgaaacgccaaccaagttggtcgtttttcttcaattcttttaccatatctttaccagcgctcaacgtttcaccgttgtaagtggctggttgatcattattaacgacagcgactggtaattcaccagtgctaccataaggatcccagacagatttaaggaaaaagatactgtacaagaatggaataaacacgattgcgattaacgaaatcatgattaaacgattcttggcaatgaacttaaattcgttttggatcatcttcatgctaaaatctcctttaattatataagttgcttaattgattacattcaatatccacgataactaaattagtctaaccttttttcatttaaatttcaagtcttatgcgccaaactattctctattcacaactgtttctaatctaacaaaaaaagacggtcgttatttatataacaaccgtctcccttatggaagaaacaaatgacttcctattaaattaattattttgtttcaatcttcgtcatgccgcccatgtatggtaccaattgttctgggattgtgacgctgccgtcttcgttttgatagttttccaagatggcggcaactgtccggccgactgctaagcctgaaccgttcaatgtgtggaccaagttgacgtggccatcttcgtcacggtaacgaatttgggcgcggcgtgcttggaagtctgtacaatctgaacaacttgagatttcacggtacgtattttgagctggtaaccaaacttcgatatcgtatgtcttagctgatgtgaagctggcatcgccagttgccaatgtgatgacgtgatatggcaagttcaatgcttttaagatattttcagcatcggcggtcattttttctagttcattgaatgattcttctggtttcgtgaatttcaccatttcaactttgttaaattgatgcatccggattaaaccacgggtatcacggccggcacttcctgcttctgaacggaaagctggtgataaggcagtgaagtagattggcaattgtgcgccatccaagatttcgtcgcggtagaagttcgtcaatggcacttcggcggttggaatcaaagtcatgggttcgccttcgttggtcattgtgtaaacatcttccgtaaacttaggaaattggccagtcccaaacattgattcgccattcactaagtacggcgtaatcatttcttcatagccttctttagcatgttgatccaacatgaagttataaatggcccgttcaagacgtgcaccggcacccttatagtaaacaaagcgactacctgatactttagcggcgcgttcaaagtctaagatgcctaatttttcaccgatatcccagtgtgctaatggttcaaaatcaaattcacggggtgttgaccatttgcgttcttcacggctaaaactttcatctgggccaacgggtgctgaatcatctgggaagttgggtaagcggactaagatgtagtccactttggccttcacttcagccaattcgctatccaaagccttgatttcggccccaacattcttcatggcagcgatttgttcagtcgcatcttctttattgcgcttggcaacggcgatggcttctgaggcagcattgcgatttttcttcaattcttcggtcttcacaattaaggcacggcgtttttcatctaatgcgatgacctcatcaatttctgcagcttgaacaccgcggctagctaacttatcctttgcccattggacattttctcgaatgactttaatatctaacattgcactctctccttttaatgatctttaattaacaacaataaaaaaagccttctcatcccttaattgggacgaaaagacttcaattcgcggtaccacccaagttcacccactacaaataataggtgccctcaattactgataacggccaggaaccgtgtagttcatcactacccactattgcgctggaatgctggattcaataccttccaccaaccggtatctctctgtcaatccatataggcgcttattcacgtgtttacttcttaatgtaagaataccgcatttaatctttaaattcaatcatcaatagatgatttttgaatccatagaccccgtaataaaccgagcatacgtccaaaatgatcgctatctgcattttgatgccatttaaacatcaccgcttctgggttaacgatgccagttaaatcaatgctcgaagtcgtaaccaccatatcagcatccattaaatccgcgtcagattgactaacatccacatacaaaacactattcagtgcagtcatcaaatcaaagtacccgaggaaggattgttccgtcacaacgacaaccttcactttattcatcggtgcaaaccgttgaatcatctgacgcaagacgttgtagtaaccactgaccaattcttcacgtaatttgactaagaatgacactttcggattgattaataagtaatccaccgtatcatcaatattttattttaggacatcatttggcttgagatattcaacactttccatcatttggtcagcgagcaccgatgtcacatcttgtttaaacatgtaagtggtcatcgtcatcgaaatcatcgtttgcacgaaaccttgataattcgcatcgtctaagtttaggtatttcttgatatcaaatggaatttgatcaataaaagcttctacaaattcgtaaatcactggaatataccgcttgtatcgcgtttcgtaagattccatgtagggattagcatcctgaatctgaatcggtccaaaattaatgatgtcatatatattgaatgattcagccatcgcttcttcttgggtcatttgtgcaagaatgctcttgatccgtaaagcttggtcttcaaagggctattttagatattcagaaaccatattgggaactggataacggataaaatcgccatctagttcagttgaaaccgtgtgaccttgtagtaatcggaaataggttacgacgattgaatacgcccctagttcacgggtcaaaatattggttttttccaattggaaccgatcaatcgcaacatcgaacgccttaagtgcatcgtctcgtttaacatcttcaaagggccaggtatgcccttccgttgccatccagaataacatcgttaagactaaatgaattttactttcgtcgccttctaaccgaagtgaatcataatacatacggatatcaaatgagcgaattaagtcgcgcaccccttttaaatggcgtagcgccgttgccttactcgtatcatgggcttcccagaattcttggaatgtaacggtctcacccttgagtaagattttgataaaatcaaacgcttctgacttattcactaataaatagtgataggcatctgttggaacgctgaacaaggttttaatatcatcaacatccggtccgataatttcctttaggtccccaataatgctcatgtacatattgtacaagctaccgtaactgcgatttaatagcattgctacttgttttagattcacatcttcaacgagcggctgattattacgcgatagttcaatccgctttttaacaggcaactcatcccgttttaaaccaacaatctccattaataaggcgtacttatcattttccgcttgcgttagaaaaatactctcacttgcgttcaaaccgattccccctagtaaaaatccttataatggtagattgtaaaattaatccgaacgctgttcggacaaaaaagatcagcttcctttaaaatggtgtttaccacaaacccatcttttaggagctgatcttttgtctagtataacctattccgaacgaattaaaatcgaaaccttttgtgaactagggctgtccaatatccaaatgggcgttcggctgaaccgatcaccgtcaacaatttcttatgaattatctcgatgtcaaccttatcaggctgaattagcacaaacagatgccgaatacaagcgatcacgatgtggtcggaaaactaagctgagcgatgagttaaagcaaaaaattctcaaccatttacgtctaaactggtcaccaggaatgattgctcacgaatttaaactagctactaaatctatttataattggctaaatcaggggagaattggtttctccttgaatgatctacctgaacatggcgtacgccaacggcgtaacgttgaccaacgatccaaatataatcaatctttggggcgatcaattgaacagcgtcccatgatgattaatcaacgtaagcgcatcggcgattttgaactagatacagtcgttggtcctcgtgggcatagtaaggcagttttattaactttaatcgatcgcaaatcacggttcctttgggcataccggttaaaagatcggacgacagcgactgttaatgaagcactaactaagttcctaaccacttttaatggtccggtgcacagctttactgtggaccgtggcactgagtttagtgggctagtatcacttgaatcacaatatggtattaagacctattactgccatgcttatacgccagctgaacgtggtagtaatgaacgctttaatcggaatttacgttatttttatcctaaagggactcgttttgagcacattagtgctcaagatttaacgacgacgttactccaaattaaccagcgaccgcttaaaatactcgactggcaaacaccgtatcaggttatgctgacaaatttgtccaaaaattcggattaaatttgcaatctacctaattagtaattaatcctaccataaattgtgcaaatagtaactattgcgttgtttaaaatcaaagattgctttttacgtcagaaatgctagaatatttaagtgacgtttggttgtaaaacaccatatgttgtatatcaataataatttaaacacattttatggtcaaaagagggagactgatgacattgctcgtacttgctggcacaattggtgcaggaaaaactagtttaactaaatatctatctgatcacttaggcactgaagccttttacgaatcagtagacgataatgaagtattaccattattctacaaagatccaactaaatatgcattcttactacaaatctatttcttaaacaaacgatttgatagtatcaaacaagcatatacagatgataacaacatcttagaccgttcaattttcgaagattcattactcttccacttgaacgctgatcttggtcgcgctaccgcaaccgaagtccgtgtctacgacgaattattagctaacatgatgcaagaattgccatttgctgcccacaagaaacgccctgacttattaatccatgtacgcgttagtttcgaaacaatgctttcacggattcaaaaacgtggtcgttcatacgaacaactagaagccgatccaaccctctacgactattataaagaattaaacagccgttatgatgcttggtatgaagcctatgacgaaagtcccaagatgcaaatcgatggtgacaaattagacttcgttgaaaacgaagctgatcgtcaaaaagtcatcgaaatgattgacgaacgggtgaaagccttaaacgcagaacaagaagcaaatatgggtgcctaattgcacaaaaaaagccgttcgacaaattgtcgaacggcttttttattatgcttgggtacctttttgcatccataattcatgaataatgccatacagccgggcatagtgatcgctactagcatttaagcgccacgtaaaatacaacgcctccggattaacgttttcgggtaaggcaatgctcgacgtccgaacaatcaggtctgcatcccgtaaagcttcatcggtcgtactaacagcgacatatttgatattatcgagtgctgttaagatatccatatagccaatgtaatcttgctcaatcacgagtgcgaccttcacctggcttacaggatgatactgctggatgacttgttgaattaaattatagtaagcctttatcaaattctcccgcccacttgctaaaaaactaaaagctggttcgaataagaggtaatctacggtatcactaatttttttatggagtagttcattgggttttagctgcggcatacgaatgactaattcattaaaaacgacagaggtcgcgtccatcccaaggatataggtcgtcaccgtagtcgttaacaacgcatttttgaaaatatcatatgtgtgctgcgaaatctctaactcatgcataatatcaaatggaatacgctccaaaaaggcagtcacaaaacgatgaatttctggtatataacgttcatctgcccaatcagcagtcaccttagtacttgttattgagcgtaacggtactggacaataccgtaacaagaagaatagtccagcggcttctgaacgcccttccgttaacgttaactctgccaaacaagttcgtaatcccgttgattctttagtgaaatcggctgcaagtaaatcactgattaaattaggatagggataccgaatagttgctaatttttcatcgggctgcacgactgcaccggccatcactcgataataagttactgccagaatcgtggcgccaatttcgtgcgttaataggttaggcttttgcaattgaaattcatcacagacatagtcaaaggccgacaaaacacattcgtgattgatttcttcaaatagccattgatgcccaccagacgccaaccagtataaggcggataagaccaatcgaattgtcttctcatcaccttccaaccggattggttcgtatgaaacccgtaagttgaaggcgcgggttagatcgcggacttgcttcaaatgacgtaatacagttgctttactactatcatgctctgctaagaaggttttaaacgatatatccccgccccgcaatagaatctgtacgaaatcatagatgtcagaatgttgtactaaatataaatgatagacatcacttggaattgcgaagagtcgcttaacatcatcttcctccgtccctaatattgcctgcagatccccaacaatactgacatacgtattgtataagctactataattacggtctaacaatgttgccacttgcttcaaattgacgtcatcgattagtgcttcgccctttttagccatgctcattcgttttctaatgggtaattcatcccatttgacattaataatatctaagaaaagagcatacttatctttttctgccgatgttaaataaacactatcggtatccacattgcttaaccccttgttccaaataattgatatatattttaccatcaatcgatattaaagcataaccattctacagcgagatttgttgcgtataacaaaaggcgatgcgttattaacacacaccgcctcaaaagctgaaaataatttcatcatcagctctaattaaacctgacacgctaataacttaaatcaccaattgccatttcaaatcagcattatatgagccaatctgataagcatcattataaggtagtgataactgtaactgactttgtttccaaccaactgtggttccataactcgttaaatcttgctcactgattggccgctgtagaatcccatcaatccattgattatcgggtgactcattagttaatgcttttgcatcactatcatttaagcggtatttaaaattttcttgcatataaaagggattattgggtcgttgatttatccccagatagcctagttgtaaatcaaaatgactacacaacggattacatatgactactttcggcgcttttggtgtaccagtatctgccacttttagttgtacacttggtacctcatttagcgcaatcgtccgattagtaccccccctacttcgacccaaaatttcgtcatcaaacgtaattgttttcgggatgccaacctctactgccccgtttaaagttaatttgaattggaatttagcgattggatttaaatcatcatttgcaataggtgcacttgccgccttttcagacaacgtaaactcaatgtcgcttgtccgcatgacatcacaatgcagcccttgctccgtagtagtcggattccctgtctgattctgactagcattaattagctgtgccataaagctctccgataaatgcaactgcgaatcggttatcaccggttgccacactacattttgatctgcattaacacgatagtataacccaaaagaatcaggcgggttaactaggtcgacttgtcctgtaatcccgtactgcggggccgcatgcagtgtgccatccgcataattaaactgcgcatggccattcgattttacagactgtgcatttttggcacccggatcagctaatgtgacagagcgaatctcaggcacctgaatgcctggaaaatcgtggccctgaccaaaaacggctttatcatgattgggtgaaatcggagcatcgggtatgtagattagttcacgaataatactttcaagtcgcgattaaattcagtatactaaatttagataaacaaacttactggaggatagtattcatgcggacttggcaaaaatggactttgattgttctggcacccttcttaataccaattatgtattttgagaaccaatattttatgagagagcagtttaaacagtcgcaaaagaatatgcagcagtcaactttaagtgattttaatgaccaagcaagcggtcaatacgcggcctttaaaatctacgctgtagccaaaccgcatggaaaaatctattattttgtcccacaaaaccaaaatggggccaatatcgatttacaaaaacaagaagtcgcactcggtaatcagctttatgcaaaagcacacaaagaatcacccgacattgaccatatcacgttgtacgtcagttatactgctaagaacttgcaagacaatacgtatgcttttaagccaaccgccgaggcttatggttttgtaaaatcacggtttaagacccgttatcaacgcttattttcacaaactggaactgaagccatctatgatatgcagcacaatacaacatcggtttcgtttaaagatttacaaaaagatagcacaacaattccgatgattcgtcaacttgcaattaaccaacaattacaagcccatgattatacccccgaacaacttacacaattggaagcacttgatttcccgggaaatgatcaagcaaccaattttgactttacaacagatggtctaacattgaaattcgcaaagaatcctcttgatattgaaacaattgccctgccaatggcaacggttggtccatacctcaatcccaatcttgtcccagaagacaatcaaatgccttccaaaaaaggtggtgctaaaaagattgcactcacctttaatacgacattaaaacctagcactattacgagtgtcattaatcaactaaacgatttaaacatcaaagcaacttttttcactactggtaaagcagctaaagaacatccggatcaactgaagcaattactcaaagctggccatgtcgttggcacccaagcgtataacaacgatgatgacttggatacaatgagcgcgtcagaaattgccgataacctcaagcaaaccgatgccgcctacttcaaagccagtggtcaattgccacacttattacgggtcacaaccgaaacccctagtacggaattaacaaccgctgctagccgggcactaatcgcttggagtgttgattcggaagattggcgcttagatattgatgcgccgacaattgtcaaaaatgtaaatgagcgtattacaggtggtgatcttgtcctactgcacacaagtgaggcaacgattaaggcattacccgcaattgctaaagaacaaaccgctcaaaaacgacatttcgtgacagtcaacgagctcttcaagcaacgattaacaccttatcaacaatatttcaaagctggtgatcaacgctcgctacaataacgcaaaaaggcccgacaacttaaattgtcgggcctttttgtaatctaaacgtgctccgtaagccgcacgctatttatgttttgataaatcaacttcttctagtggaatcatcttagttttgtaccgtactttatagtaaacatatagtacgacaaacaatggaatgctcatataactaatcccaatcgctgtccaatcgaagttcttaaaggcttgaatatcttgccctgcaatcaccaataaacaaagcacgaatgcaaaaatgggaccaaatgggaaccaacgtgcatgatatttcaattcgctcaactgatgaccttgtgccttgaacgcacgacggaaacgataatgtgacacagcaattcctaaccaagcaataaacccagtcaacccactagctgccactaagaataaataaatccgagttccaaaaatacttgtcacaaaggttaaagctcctatgattgttgtaccaatcagtgccattactgggacgccacgtttgcttgtcttagcgaaaattttagctgcatagccatcttcagccattgaccacaacatccgggatgaagcgtacatccctgagtttgccgctgataacactgatgttaagatcactgcgttcatgatgctggctgcagaagctaacccagcccgtttgaacactaacgtaaatggactaacagcaatattcgtttcactcgcgcccaacaatgagtggctatcataaggaattaaacaagcaatcacgaagattgaaagaatataaaatagcagaatgcgccagaaaacttgtttaatggcctttggaatactcttttctggggtctttgattcaccagctgtaatcccaattagttcggtgccttggaatgagaagccagcaatgacgaagacactcaacatcattggtaacccaccaacaaatggggccttcttataagtgaagttactcaagccagtatgatggccacccataatcccgagaatcgttagtaacccaacacctaagaaaataatgaccgtaatcactttgattaacgcaaaccaatattccgtttcgccgaatgatttaacactcgtgatgttaatcaagaaaattaataatagtgcgactaagctaaaaatccaccctggcatatcaggaagccagaattccgtaacgagtgccgcggtactaatatcaaccgccaacgtaatcgcccagttaaaccaataattccaccctaacgcaaaaccaagggctggatcaacaaaccgcgttgcataggttgagaaagaacctgagacaggcaagtacgttgccatttcacccaaactggtcatcaagaagaagaccataatcccaatcccacaataggctaacaatgcaccacctggacctgcctttgcaattgctgaaccacttgtcacaaataagcccgtcccgatactaccgcccaacgcaatcatcgaaagatgccgcgtctttaactcccgcttcatttcatttcctgccataatacttcgctcttttctctatgatttcaagaaaaagccccaaccacgttctagcaaacaaaaaaacagtctttttgtctgctaaaaacgacaaaaagactgatagccttataatatccgttgatagcgccccgtaacatttcgttacgacagtccttgatttattcaaccaagtcccaacatcaaaatgaataagcaaattgacatttcggcaaattcccctttaattatccctcattactgcttagtcagttcaggataacgactcatggtttttgcgacctcttatcttgttagaaatgagtatacagaattcacacaaccacgtcaattatttccattaaaaaaccacgattatttcaatcgtggttttcattttgcttattgttctttatctttgcgtgatttccgccataaaagaattatcaatagtaggataatgacaatcataataccgataatgacatataaccaccagttattgttctctggtaattcaacggccttatcgttatattttgcaacttcctgacgggtaatctcgcttagtattggttcctgtataatcaatcaatccattttcattggttgtcgctgtcgtaggggtcacatcgaccgtaattggtttcgttccactattttgaacccgcacaccaacttcttgttttcgaccaggagtaacttttaaatcataatagcccaactccgtatccgtttgattatcaggatagacgggcgtaaccgaataagtcactttctccgcctgaactggttgatgactaaccatcaacatcaggccaaaagtggcaaccaccgctaataacaatccaaatcgttgcttcattcgtctcattctattcgctactccttctaattcagagtacgttttatgtaataaaataataagttttcagcaaatatatatttttaattttggtgttaattattttcttcactattaatcttaatcctttgttaacaagtggtacggcgttaattggatatgccattgtccattttttaaataaattatcaattttctgaaactatcaactaatcaattgaaaactaattttcaattccagcacaaaaaaagcaatccaacaaccggattgctttcactctattttaaatttttaatgatcttctggatgagtaattcacgctgttcggctgattgattccaatcaatcactggaatggcttgatgcccaattgtctcaataatcaagccagaaacagtttgccgttttaactcgttcgcccatagcatgtccgccttgtggaacgcagcgttaataatcaatgttccttgtttagcaacgggttggaagtcattgaagaccgtatccaacttacccgtatctggataagacttaatttgtccttccgtggccaacacaacatcgtagattgaaacttcatcggctggccgcgctagtgtaaaaccaccactattaccagaagccgatttcactagcccagccactactaacttacgaataattttgcgtaggtaagtctgtgacccgcctaagcgatgatgaatgacttcagacgaaattgtgtgttcaggatcttgcgtcgccaaaagtacgataatacaagttgcttgttcaaacgcccgtgttaaatgcattagccctatcccctttttaacagtcgcgcactacgcctttcgcgtcttagtgaatgaaccagaggattgacctgcgtcggtttgtacctcaaacccatatttttcaagaatgtgtgcaactttcttaaaatcatctctatcgaacgtactgatattaccatcaattgtttcaatttccaacttattcgctaaattacagaaggctttcactgccaattgtgctaaaccaagattttggaaatcataaacagctaagcgtgaagctgctcctaatgtttcaagaactgtaatgtgcatttcttttttccatttattggtttcaaataagagttgtgcttgaaaatcaaccgttgaatgtccaaagcggtcgacgttagcgtatggtgtgtagacaaaaatcgaacttgtcgattcttgttgaccattttcgcgatagtctgtatagacgatgtactgcttaaccttttcatcattaacctgattcatacttgatagaatcgtcaaattttcgtttgcctcaatttgcgctaacttccgtgcataggcttggtcgttttcgtttgccatttgattaacccccatttgtctttcaaaccgattataccatagctttctcatttaaaccgtgatttattacggttataaccatgttatttttacaatttgaaaacgttcactattcggcggtagtactgaactcgttgcccgcctaaataatccggtagttgtgattgataagtcttctcgaactgaactttctgtaaactcgcttgcgatgcttggttggttaaaaagcaggccgcattaaaggtgtttacaccagtttcttgcgcataggcttgcatcgttgccggcaatactgcgctgataatcccacgtcgttgatatgccggtaagatggcaaaactgagttcatatgccgcgactgattgtccatccgcactaagggtaggggcgagcattatcaatccttgcaccacctgcgttgtgcgatcaacaatcgcccaagcatcctcatcattcatcaacattgttagaaacgactgtgcttcttgttgagattgaaaagccgtcatatttagctgcgtcacaatctttttttgacaaccaatttgatagaccacttcaagatccattagttgaaaatgccgtagttcagttgtggcagtcctaatctgcatctggaacaactcctttgtcatatcaacactcatagtaacccacttacagtgttgcgccaagtaaattcttatgtttccattaaacaaaagcgccaaagttgtggtataccactttttcagtttatactaataacgattaattactcttgtagaaagcgagcataccgatgacattccgcgattatttccatttattttcgaccgtttctcaacaagccgaatcctatgattattttttacactttattgagacacctgttcctgatttacaacggtatcccgaattaactaaaatttgtgattgggccgcttatgatgatcacagttttcgtctgtggacaagcttgcccctcgacgaattcgagcagcgttttgctgaaactgtcccattaccaagcgattcttaccagttagattacagttacaatttgcaagatacaaattttttctaaagttcatgcttgacttttaattcgaactaccgtaaattgaataacaatcataagtcatcttaattcaaactaagtagtgcattatctgggtgtcagaaagtcggtggttgctgcgaaccgatcagggtaattgttacgaaatactgaatggatgattcggctaattaacaggaccgttatcacctgtaagagtggtgtgttaccttaaaatgacacgctaactgggtggtaccgcggtttccaatcgtccctattcgcatcagcgagtagggactttttttgtagagtgcgttatttagcgcttaatatctgaacatttgcatagaacattgccaatcaaaaacacatttcaactatggagggattttcatgttcaagattgcatcgtgcgggggaatcctccgttatcagtcttttgtcgcaccagcctaaccattaaacttaaaaggatgcgatttaaatgacaaaacacaaaactagtttattagaagcaagtatcgttttacttattctgctagccatcatgggtagcggcgtgattgttttccaactttcaccacaaacacccgtcttaacggcgattgccctcttgattctatgggcccgttggcggcactttagctgggacgccattcattctggtatcgaagatggtctcaaaagcggaatcattcctatcattattttcattctcgtcggcgccttaatcagtatctggattgccgccggtgtgattcctagcctgatggtctggggcttcaaaatggtcagtgtacactggttcattccctcgattttcgtcgtctgtgcgcttgtcggcagtgccatcgggagcgcctttaccgtcatttcaaccgtcggcattgctttcttcgggattggagccacactcggactaaacactaccatcgtggccgcagctattatttccggggcaatattcggtgataagtcatcgccactttcacaatcaacaaacttaaccgcagcggttactgaaacagatctatttgaacatattaagaacttgatgtggaccacggttccagcgtttgttggctcattaattttatacgctatcattggccacacctcgaaaaatgtctccctcgataaaattggtgcgacggttgctgtcttaaacacgcacacttcagttagcctacttgcactaattccaattatcttaattttcgtttgtgctcgccttaaaatgccagcaattccaacactctttttaaacattgccgtttcaatcggtttaatctttttccacaacccacacacaccaattgctaaaattgcgagttacattgaaaatgggtttgttgcccacaccggcgataaaagtatcgatgccttgctctcacgcggtgggattaatagcatgttaagcaccgtcgccttaattatcttgaccttaaccctcggtggcctcttaatgaagcttggtttaatcgaacgcgtgatggcccctcttgctacccatcttaagacgccaggtcaattgctcagcgccgttattgcttctgggattggcgttaacctctttatcggtgaagaattcctttctgtgattctccctggtaaagccttcaagagcacctttgaaaaatcaaacttgagtaatcttgctttagggcgcgcccttgaagatggtgggacagttatcaactacctcgttccatggggcgtcgctggcgtttttgccgctaatactttaggcgtccctaccttgagttaccttccattttgtttcttcagtctcttatcaccaatcttctcaattctcagtgccgttactggcatcgggttaaagagaaaaaccgcctaaacacgcaaaaaaggcccaggataaaatatcctgggcctttttttacattaattgcattaggaattgaccgccatacaccagcgcaaaactatacactgcaattgaagctggcttgcataaaataatgatccatgtaaatttcttcaatgacatctcggtgagcccagccatcaagcataagacatcgtctggtgcgaccggtaagaaaatcgcaagtgcgaagaagcgcacaaagtttttcttttccataattgtcccgatatacttgtcatacgttttttcactgatgacgtgtaagatgaacggcttcccaaattgtcgtgctaataagaagttcaagatagaaccaattgcaatcccgacgtaattataaacaaacccccaaagtgggccgaataccaaaaccccggctgcggtgctaatcccgcctggaatgacaggaatcacaacttgaataatctgaatcgtgatgaaaatcagcggaccaattagcacagagtgccccaaatacgcctgcaacgcggtcgtgttattaaaaagaccaagccgagaccaataaatagccaatgagatgcttccgattaatgccatgagagacgttgcgctgattaagcgtcttgaaattgttctactcatccgctgaattccttccaaggttaattttaattataatttaccacattcaacattattttttatcggtcgctagtctgatttaaaaaagcttaactttctaagaacgtccgaaatggtttcaatccttgtgcatgatatttttcaacaaaggccgctacttctgctggatcctgtgtttgatcatcaatcacgagttgttcaacgggtaacggacgttcgttagcaattttaacatcaatcacaacaggttccttcgtgcctttagcagcagcaaaagcagctttcaattcagctaatgtccgtaccgtaaatccttttgcgcccatcgctgttgctgctgcaccgtaatctgccccttgaatggcaacccctgagtgtggttgacccttatcatcttgttcagcttcaatgaatccgaatgaatcgttgcttaatacaacgttgatgattggcatttggtatttaacttgcgtgataatatcttgcatcaccatcgtgaagccaccgtcaccactaatcgaccagatttgacggtcagggtaggcagcctgggtcccgattgctgcaggcactgcgcaacccattgtggcataccatgctgataacgtcatacgttggcctggatgcattttcaagaaacgcaccccatcgattgaaacattcccaacatcgagattaaagatggcatcgtcagtggccatctcattgatttgtttgaagacgggttccacacgtaacggtgtttgatcgtcttcttcaaaactggctttccattcattccagttttctttattggcgagtgctgctttataaaaggcagattttttggcaactggttcactcgcggctagcaatgcctttaatgccgtcttagcatccgctaaaattccgacatccacatggtgtctgtgtcctagtttagtaggatcgatatcaatttgaataaatttggcatctggcttgaagaagtattgaccgaattcataattgctaccgacaaataagattagatcagcagcttctgccaaatcaactccgggtttcgtggctactcgcccagctgaaaccatataagctggatggtcatcggcaacaatcccttttgaaagggctgatgacatcattgggatactcaaccgatcagataaagcaaccaattcttcacccgcagcacgtgcaccttgaccaaaataaataatgggttgttttgcatctttaattaactgtaatgtacgatcaatatccgcgcttcttggctctggataattgcccatttggaataagtttgcagtggcctcgaagttatcttcaatcggttcccagcctaggttagttggaatcgtgacaactgctacgccgcggtgtttataggcttgttgaatggcttggtcgactacaagtggcatctgttcagccgtcattaccgtccgattatagactgccacatcagcaaacatggggttttcattcatttcttggaaataatccgtattcatcacacccgtagcaacttgtccaactaatgctaatacaggaacattatcatatttagcatcatagagaccatttaacaagtggactgcaccaggtccggctgagccaaatgtagcagcaatcttgccagttgctttggcttcacccgccgctgctagtgcaccgacttcttcatggcgcacttgaatgtaacgcataatcgctttctggttatgtagtgcattcatcgttgaatcaaacgagccaccgggtaaaccaaaaatatggtcaattccccagtctgccatgacttttaacattgcatctgatgcgtttattttctgtgctaccattaataaagacctcctgatgattttatgtttcacttacttaagtataccgcttaaaatgtaagcgttacaaataatcctgaataattcatactttgttgcgtaaaggtaatttgccccttttaacgtttaatttagctcaaatttaatccgcaactatttttgagtgtatttgagctatttttaagacaattttatttttgattggtgtcaaaagagtaaactactcccttgatcgtacttaaattttttaaattgtcttttttaattactagtgagctgaaattcttgaatcctaaacaatgtttgccagtataaatcatcaaaaacattggtactagaaagatgcagccataatttacgtgcatgttgggtgactctgccggccaaatgaaagagcttgaaacgtaaagtggcgctcgttgcgttccctaattcagctgagaaaaccagttttttcatggcttgaactaagttataagccacaccggcgagtaacattctaaactggttagccgtaaaactggaactatccgttttatcaaaggcaaagccacttttaacttctttgatcagatcctccatggctccacgttggtgatagagttcaaagacgtcactggcaaaagccagctccaagttagtcacgataaattcgtgtttaaagagtagctcgccagcagggcgagttgatttaatgatcacggggtaagcgcgaccccaagtgtccggttggtaatctgtcaaacggtgccactggacatctttttcggcgaagtcttccccaggttgccccacatggatcaagtgctcggcgatccgttgtagttttggattagccttgagacggatcgtaaactttgccccagcttcttcacaggcggcataaatttctggcttggcaaaacccgagtcagcccggactagtacatctaaagcagcgtattgtttcagtagcggtttcaaaaaagcttccgcatttttggaagtgtattcgttacctggccgtaatttagctcctaagagacaacccgaaaaaccatcaaaagccaacaggggatgataaccgttcgtttgataatgggtgttaaaagcactgcctttctggtaaccaaatgtatcggaatgagtcgaatcaagatcaatgatcagttgacgttgcttcttttgtgtgatcactaactgcgctaacttggcgactaattttgtgatcccggccaagtcgtctgcggaaatttggttgatatagcgtgaaagagttggttgcgaagcaactaaattatctaaaacaagctcaaagctcatgtctgcggtcagtttattagcggcagtatcgtcgaaataacccgcaatcagctgaatcaacagttgtttaaacagctggttcttatggtacctatagaacttgcggttttccttaaaatggagagtttctttcaaaaggcgcttaaagtggatctgatgcataaattcagccactaaaattagacccgcatcgttagataaatgaccaccattattagaaagaaccagatttttgttgaagttaacggtttgttgttgtaaagtcgacatatggagcactcctgttctgtgttggttttggtcgacttaacaatagcacaggctgtgctctttttgtatacgcaattaaacacctaaaaggtgttggtttggatcacggacaaacaagatgataacaggcaaagaaagaaaaactgttaaagatatgaattattcaggattattattagtaaaaatatgactcctaacaagcaaccgcagccgatgttgaaaaagaagctcaaaacgctccacacaaaaaggacgcataatataaacaggaatgtcagcatcattgccacctctttatttgcaaaccacgctcacttttaccggcttagatcaactttttcattgatcagccacacaacaatgtcgccaattaaaaccacaacaaattcaccaatgccgactgtcaaatatgtcatccaaaacaaaacttcactgaccagatgtaattctagtgcgactgcctatgacattccggccccattgatgactataaattagcaatcaaacacccctcatgtaacgtttgttgaaaaccaccatagtattgagcagttctgacaaacgaaattgaatcggtctataactcaatggtgtaaaagcaaacgttaaaactacataaagtgcagcaatcaaaactgttttagtgatctcagcaactttattattaagacgtgccctttttaagaatctcctagtttttaggtgggatggtcacgaaccaccatgtaacaagtaattattccattaatactgtactttcaagtatagaaaaaagacgaccgtttatcaacctgaaaagcatgttataattttattattagacattttaacaaccgagtaactagtcgctaaaaatcgtggatcaactaactgtctagcctaacaaatatttgacacgacccacgaaatttatacaatgaatggatattactaatgaaaatcgctattttaactgacagcgctgcgatgatcagcagtaaagtcggatcacaaccgaatattagggtcttacagatcccactttcattggatggagaagcttattatcccaatgaattaccagaagttgctggaatagaaacgctaagggaagccacgcttaacactgtaacagaagagcagatccctctaaccacaatttctgcagtaaccgatgaacttcaacaagctggttatactgacgtactttgtatacatattgccagttcgatcagtggcttaggctcaaatctctctactttcgccaaaagctgtcaacagcagcttaagatccatctctttgattctcatactcttggtcctgcagaaggagcgttggttgaacgagcacttactatgattactcacggactaaaaattgctgacattttagcagaactaaccaagtatcgccaaaagcaacatacactggtcataatggaaaatctcaaaaacttgcgtcggatcggttctatttcaaataatgcacatctcttcagtaataatatgctgcattataaaaccttgctacatttttccgaaaatggtgaacttgaagtcttgatgaaaagttcacgcacgaaaaaaattgcaacggcgctattgaataagtttcgcagctctgcagcaaaaccggaactagcaatcgtggcagacaatacaatggtcttggaaaaatatgtttcttgcctgaaagaaattatgccgcaacttcaactagtaactgatctatattcaccttcgatattttccttcatcggtccacaagcactgatcattagttggcaaaataattaactacatgcaaaaagatcgtccttcaatttaaagaagaacgatcttttttgtttgcagttctcttatattaactttttgctatttaataacggactcgcaattggccagcttctcagctttctgcttagttatctaaatcaaattgacccgtcagtttttgcaactgagcagcagtttcttccaaggtcgaaacatgttgggtaaactcatccatcgtagcttgcacttcttcagagttagccgaaacttcctctattcctgctgcgttttcttgtgttgaagctgagatgctttcaagtttatctaagatcatcttttgagtttcactgatctcttttgtaccctcatggatcttttgaacatttgcacccatagcttcattatgcttataaacgttcattgtcgacttgatggcttctgtgatcaaaccagtctgtttttcactgctttccagtgagtctgttgttgtcttgaccaaaccagttgattgctgtctgatctgttcaatgatcgactcaatttctttagtcgaatcattactttgttcagctaacttccggatctccgctgcaacaactgagaatccttttcctgcttcgcctgcactagccgcttcgatcgatgcattcaaagcaagcaagttcgtctgtcttgcaatatcattgataacgttaatgatcttagtaatgttttgtacatcactatccatttcctgaacactactcatcaaagcttgcattccgttgatctcatttgaccagttaccattgaccttgtccatgacatccaggttattttgtccaacttttgaagcttctttggatgaattagcaagctcttccatattcgcattgacattatcaatatgtgcagtgattttttgaacgttatccacgctttcagtagtttcttttgcttgtgatcctgtcacttcagcaatttcagtgatcgtctgtgcgatttcttcagaagcagttgttgtttgtttcgaaaggtcaagtaatgatgcagctttttcagaaacattcttggcttcttgctgtgtttgtccgatcagaacagtgacagaagcgatcatattattgtaactagccgctaatctgttaaactcatgtccattcacatcagctctggtcatcttttgagctagacgttctattggtaccttagaatactcgattttttcacccactgcaggcacgtaactcatcttaccttggccagcatctataaagaacttctcaagtattaataaagcacgtttgagcaaacctgcactatagtaagatattatcacggctaaaatgatgatcgccaacattgagattgtcaaggttatcaacatatgatgtgtgcctgcgctcaaatcactattgttcatttgggcgatggtccaattgtcagttgtgccattgcccttgtcaaaggtaaccttattgatctgcgaacctccaggaactttgatcgtccccttctttttcgctgaagcagccactgctttataaacggctgtcttgttgatcattttacctgctttaaaagtattattgcttttaccagtgttctttttgatcaaaaccctgccggctttagttaaaacggcggcttgaccattgtttccgatttccatcgattcaacagatttttgtactgatgaatatgaaacagtaactgctaaaacatgggctttcccctgcttatctacgattttctgggaaacacttgcactatacgaatgattagccggatcttcataaggaatcgaccaatatgcatgtcctgtgggtgctttttgataccaatcttgatctaaaatattcatatctttaggcatcgcaaaattcgaataagcatatgtaccatcagtgttgacatacatcaagttggtgatcgttccctgggcgtcgccattggcaattttcaaagttctgttagcatcttttaagttgacattattggtcaactctggtcttttttccaaactagcaatttgtccagtaacatcttgccgcatgtcaacttgttgccgttgcaaaacatttacagccgtcacttttaaacggtcatttttctcgatcaattgctgacgtgtattcccgtatgagatcaaattcattataattgccggtaccaatgctatcaataagagtgacgataaaaaatacttctgaatactctttttagcaacttttttcttacttgccattttctttccccatctttccctaactatctaatttgatcccctaaggatctcatgactatcgttcacaaaagcactgaagcaaacaacccctaaataatatgtttgccagtatttgcttttgcttgcgctgaagtcatcaaattaacgagcaattactgctcttttacccctttagccccactaaaacaaaacataactttaacgcagataatctaatatcgaagtttgcatgaccttagtccccatagccaaggtcgaacgatatgcaatcatttgattttgatattccatatacttctctgtaacatcaacatcttgtttattagataaagtttccgctaaagtatttttctcagatttatttcgagctgatgctgaacttaaacgattttcgatcgaaccgatcttagatctatagtcagtaaagttttcagtaaatttatcgatccctgacaaatattcactggataactttctatctggatcccccgatttcaaagtatcgatcaaaccgctaaagaattcggtcagttcagacttgctatctttatcaatgccagacgaaccatcggcatgcatcaaacgtgaaccatcagtagctaaatctaagctgacaccatctgagatctcgcgctgtaaattatccacgttgcctctgtattctaaactgacagctgccccttcagcatctttaataacagcaaatggtggctcttgtgtctttgtccccccaaagatatacctgccatcatagttggtattcaaggcatcaactatccctgagatcgactgtgagatttctttacggttcgcattgtaaacggcaggtgtagctgttccgctattggccgacgactcgatcaaatttctaatgttaagcatcaaggtcgaaacattatctaaagctgagtcttgcgtttgcgaccagagcgtggaatcagaaattgtttggccatacgttttgttttgtgaaattgaaacattcagatctaagatctttgcgactaacaaaggattatcagaagccttattgacctctttcaaactagacagttgattcattgtcttttgaaccttgttagtactgatctgtaaattcttcaagaaatcagaatattccattttactggaaaccctcattgattaaacccccgttctattgatcaaagtatccaacatttctgaaacgacatttaacaatttggcattagcttgaaaaccttgttgaaatctgatcacatctgacatttcttcgttcaaattaacaccagaagctgcttgatctttgtattccaattgattcaacgctgataattgagcagatgccatattgtctgctttttgtttagatatcccattttttgtaacaatactgttgtaagcacctgggatcgttaaaccctctttagaattattgaaggtcaaagtatctttattataatttttcagcaaattcgctgtatcgaccggataaccaagcttactctttaaagctctagccatcgctaaagcacgtccattatctccttcggccggatcatcaccagtaccgactttcattttgcctggatctgcgactaaatcatcgttgatcttaatacttaaagccggatcactgagatcagtgatttcaaaaaagccgctatctggagtttgcccgtcagaataaacgatattttcaatttctacaacgcctttagcaaaatcatttaattcagctcgatggctttccacttcagccaatgattcttgcaaaccgccgatcgaacctgacttaactgctaacttgctatacttacctgaaccgttcgctgtttcaaaaacgacttctccgaccgtgaagtctccatcgatcgtttgctttggttgtgtttcatcaccatttggcaaaatctgagctttgccgtcagagttactgacaacaacatttaacttagtctgtactcctttttcattgtcaaccactgcatggtcaccgatactaagtgaagcacggccatatttgtcaaacgaaactgttaaattactttcagcagacatatcctttaataaactatcgcgctgatctaacaaatcattgggctgttcatcacttaaatgactgtcatacaactgttgattcaaattagcgagttgttccgccttttcattaaaatctagaacagttttcgccaaagaagaacgtgtatcagtagaaacttgtgaaacttgccgtgcagtttgctggatataagaagctaaagcaacacccatttgaacactattagttttagccgtatccaactcgggattgtcggctaacttttgtaagctgtcagcaaaattattcaattgtgtaatgagtccatcgtctgacggctcatgtaatgcattttctaataaagccaaaacatctgacttttggacgttaaaattgtaatctgaattagaatctcgaacctgtgaacgtacaaagtcatcaacgatccgtgagataccatcagcttgaacaccgctaccgatcaaaccgactcctgtttttgcataagggatcttcgttgataaatcaacacgttggcgcgagtaaccttcggtattagtattagcaatattatgactgctagtctgcaagccgatttggttagcatctaacccactgcgagcagtattcaaagtaccaaataaacctgacatgaaagtcctcctaaagaataacaaggtgaagtgaaccgcataaaagttgagcactatcggactttgacaataagtcgtggtttgcgacttgttggcgaagttggataggcacagacttttggttcacgcaacctgactaagaataacaaggtgaagaaatgcggttagaagccgagcattaacggactttaacaataagtcgtgcatttagcgactttttgttgaagttagttaagcacaagcttttgcatttcgtaacctgactaataacaaggtgaagtgaaccgcataaaagttgagcactatcggactttgacaataagtcgtggtttacgacttgttggcgaagttggataggcacagacttttggttcacgcaccccttctacaacctaaaatgactgatctacgattgccgcaggaatatcttctcgcttaggttgactttgagtcctatgctgatcaacataagtattttcctgtttttccaagctgtgttggatcgtatccatcatttttttctgataagccaaggcttgttgcgtcaacaataaattagtttcttgcaactcttggatttcttgaatcagcatctttgttttgtcgccaatttcaccagtatacttctcaaaaatcggtaagaaatcttccttttgcggaacaatttcatttagcgattctccgtcatcaagaactaaaaacttttgttcacgtttcagtattttgataaataatttaagcttagcctgaaatgccttttcattcatctttatttccttcttgtttcatttcctggaacatctgatcagcaatcttttctggtgagaccttatatgttccgtttgccaactgctgtttgattttgtcgaccttagccgcatccacatcatcgtctatatcacgatttttagcgttgtttactaatctttgagcagtatctgataatttaacattaaactgttgtggtgcaccctttttcgttgttttcgaggcttgattgtgatagtagttttggatcatttgtgaattgattgaagaaatatctcgattaattttcatgtgaatgcctcctttttcctttttgactctacaaatacagttatcggccaaaataaaaaaagttaaacctaaaagttcaactttttttaacttaatttattttattgatcctttgtttttgagaaatgatcttattgatccgcacgccaaagttttcattgatcacaacaacttccccagttgcgatcaattttccgttcaacatgatctccaaaggttcgtctgttaatttatcaagttcgataactgaaccagtgttaaagttcaaaatatctcgaacagtctttttagtccgccccaagacaacgcttaggtttaatggaatatctaagatcaaatctaagttatcaccgctgatttcttggtgactcgacaattcttcaaattcgggtttagaaatttccacgttactgacctgcgcctttctttgtggttgttcattgcttggtttttgcgggatcttaacttgttgcggagctggttgtggtttactaatagccttggctttctcgactgctggtttctccgcatcacgtttgacaactgttgctttgtcagacatcattgctttcacaatatctttgaccatttccaaagaaaagatctgcataatttcactctcgatcagtccttctacatccaagttaaatgaaatacaataaatttcttcctcacggtccaaagagtcttcattcacatcgccgggattttcccacaaatgcacttttggaggaagaatatcgactttttggttgatcatagtagccatggatgtcgaagctgaaccaatcatttgattcatcgcttcacccacggcacttaattcgacttcagtaaattcttctgaagctgactttccatcgccacccatcatcagatcagcaataaccgttgcatcactgacctctagcaacattaagttagttcctgctaaaccttcacgaaattcaacggtcgtagcaactttgggtgcatggatctggtcgagtaattcaccaaaatggatttttttaacacgtggtgtcgtaattgccacacgatgagtcagaattgatgacagagttgttgctgcctgtgacatggaaatattaccaacttcaccgatcaggtctttgaccccttggcgatctaacccctccaataattcttcatcatctgattgcgcagcttcttgagcatcactgccattcatcaaagcatctatttgttcttgtgttaaactctccgtcattcttcttccccctcgatcttgctcaataactcaattgcgaattgtccattctttttccctggtttgacccagtaaaacggtcggtcttcaatgtacgtatctaacggactggagattttagagtccagcttgatgacgtcacctggttctaatttcaagaaatcagccaagtccatttgggtgttgcccaaaacgacttccattggcagatctattgcgtttaacccgtgttttaattcgctttggtcatcttcacttaattcctggcttgagtcgaaccaattatgcaaactcaatttatctaggataccttcgaatgaaacataaggaatacacaagttaataaatgttgaaactccgaaaagctgtactgtgaaagtagctaatacaactggttcattaggtgataaggactgtagtaattgtggatttgtttctagagattcaagctcaacatcaagtgtcaggacttctttccaaactgattgcaaaattttagagaattcacccataacctcatctaataatgttaattcgatatctgtaaaaccatttttatccaaaggcggttgattttttcggttactctccaaatcagcaccaccacacaacaattcgactaaagtcatacatagttggggattgatttcgatcatgtgtgatcctttaaggggagctgctttaaacattccgatcaaagtcacacgtgggattgaatgaatgaattcgtcataactgatctgctcgatcgatgctaattgcatatccaagttagtccgcaagatatttgaaagaacattgccgctcatcttagcgaagtcttcaaaaatcatgtgtaaggtatttatatattctttagatagccgtgtcggccttctaaaatcgtatggcttcgcttgtgattcgtcattttgctcttcatcgatcacttcttcgtctaattcgcccgaatcataggcatttaaaagtgaatcgatttcctgctgtgataacacctgatccacaaagacacttcctctcgctcattagttcattccacaattaaaaaatcttatcattaacgtcgatcacatcagcaatcgtttgttcacccaagtctaccacaccggtaaaataaagggcggcttgatcttcacttagttgaatatcatcaggatcaacatccatcacttcgatcacttcatcgatcaataatccacgacgttcatcatcttttttcattatcataatatttcggtttgtttttgattccggcagtcctactaactgtgccaagctgatcaccgtcaacactgtgcctcgcaaatttatcaagcccttgacccaaagcggagcaagcgggactttggtaatttgaaccgtatcaacaacttcttctacagtttcggcagctatcaaataatgttgctgattcattttaaacaaaatcatctgcattaaaacacactccctttcttaattaaattcagtcaatagaactttaattaagacaatgccttatctaaggctttgatcacccgatcagtatcaaaaggtttgacgataaaatcgactgctccagctctgatagcatccatgaccattccttgttggcccatcgcactgcacattacaacttttgcactgctatcaaattccttgatcattttcacggcctggatcccatccacatccggcatggtaatatccattgttaccaagtccggtttctcagactgataaaggtcgaaggcttcttgcccattttgcgcttctccagcgacctcatagccgttcttttctaaaatatcctttaatttcattctcataaaaacagcgtcatcgacgatcaaaactttatttgccacgcgacattctcctctcaaactccaagtgattttatcattttgtcaattacacccaactctgggatgaagtatagtgaagcttccaagtaattagaatcataagtaaattcatttctgatcaccatgatctcatcaccaaactgttcaaattccatatatgcactactaatcacggcaccaaacatatcaaacgaacttaccggaacttctggttttaatttcttttccagcatcccgccgatcgatgttaaaaatgaacttgaaacaatgttagtcaattcactaactgcagaaaccttaatttcttcggtcacaccttgatctgttcccatcatcaaacttgagatctctttagcggccgggtccgtaataacaaatagcatcgcaccctttaagtcaccatggatgctgcttaaaacggcataaacttcctggtcatcggccataacttgctggtaaagctcgtcataacttaagatattgacttctggaacacgcatcctgatcacactgccaaccatttgtgatattgttgtagctgctttgccgccgccaatattcataacttcttttaacgcatctaattgtatgtttgaatatgccatcttaacccacctgtgcgtctttacagatcgtattgacgtccaagatcaatgcgatcgagccgttgccaaggatcgtcgcgccttggaatcttttgattttttgcaacatcggatcaatcttcttgattacgatttcttgctgtccgatcaattcatcaactacgatcccaaagtctttattatcacccttgatcaagatcatatatttctttccctgatccttttcagggatattcaaaatgttggcagtccggatcactggtgtcaatcctgtctgtaaaggatagacttcctgactagcagtttgtaaaatattatcttcatggatcatttcgacccgttcaacaacatctaacgggatagcaaatgtttcttcgcctagtttgaccatcagtgcctgaataatagacaaggtcaacggtaatttgataactgttttcgtacccacattgactttactgtcaacttccaatgaaccgcccagttcgttgattttagcttgaacagcatccaagccgaccccacgtcctgaaatgttagtgatctttttagccgttgaaaagccaggattaaagactaacatttgcagctctttatcactcataccggtcgtatcgattccacgctcttcagcggtaattttaaggacttgtggatcaaggcctttaccatcatcgctcaaagtgatcatgaccttatttccttcttgataagccgataattttatctttccttcttccggtttgccaagtttctttctgttttcagcatcctcgatcccatggtcggctgaatttctaactaaatggatcaagggctcactgagttcggtaaccacagttttatctaattcagtttcttcgccctcaatttcaagagtcatctttttatttaactggttggaaagatcgcgaaccatccgtggaaaacgactaaagacaacgctgacttgctgcatccgaattttcaaaaccaaatcctgcagttcagatgtcaagcgtgaaacctgttctaaagattcatgcacttcttctaaattttggcgactattggcatcttctagttgattgcgataaacgaccaactcagatacaacattcaaaaaggtatccaaccgagaaagatcaactctgatcgactgatttttggcatttttttgatgcgaagtgctcttcttagacggggcttttgctttcttaggttcaggagcagcgctttttttctcagtagtattttctttgtcaacagctggttgtgcgtctttttgtggttcttcagcggctgccttttgagttttctcatcgaattctgccgtcaaaacttcagcgatctcactactagattcaatgatcttcttaatgtcatcttgattactttcagttaggatcaacaatttgaaatctgtatcaaaattgccttcttccagctggtcaggagccggttcagtgtgaataatatctccttcactgtcgagcttatcgatgactaagaatgctcgtgggcctttcagcattgactctggatcgattcgaactgccgcactgatcacattaagatgttgtgttttagcctgttcgatcgctgataagtcagcttcttctaaagtttcaaatttcagttcgagctgactatcttctggagctttcttctcatctacatttttatcagcggtttttgtttggccgccatctaattcattttcaactttatctaattcattccataattctgtgatctgatcttcgctttgttcttcttcatctcgcaagccgtctagaagttcggtcaatttatctaagcaccgaaaaatcagagaaatatgatcacttgttaccttcaacttgcctgatttgaaaagatcaaaaatatcttccattttatgagtcaacttgctcatgacagtatatcccatagttgctgacattccttttagggtatgtgcagctctaaaaatttcattgatcaaatcgatattgtctggttctttttcaagttctagaatattatcatttagttgtgttaaattatcttcgctttcttcgaaaaagatatcgcgataaacactattatcgtcagccatcaatgatccccccattcaaattatttacacctaagcacgaatggtctgtgcttattgttaaagtccgctaatgctcgacttttaaccggctcactccaccttgttttcttagtcaggttgcttgagacagaaagctccgcctatccaacattagttccacatcgcaaaatacgcaatctgaatctagtgtccgatagtgctcactttctcccgtctcactcaccttgtttctcatatataaacgactctattttctttaaccccagcttttctgcgctgttaagtgtttctgttgctcccgtgaacaatattccacctggtaccagcgcctcacttattttttgataaactcgatcgcgtgccatgggtttgaaataaatcgttacattgcgacaaattatcgcatgaaaacctgattcatactggtcagccaataaatcatgtttcttgaacgaaactcgttgtttgacggctggccctatttgatactggtctggtcctaatgacttaaaatatcgtctaacatcagtatcagaaacattttttaactcatttgtcgaatactgacctaaacgtgctttctttaaaatgtcatcatcaatatccgttgctagaacattgcccataagatgatttttttctaagatcatcgctaaggtgtatggttcggcgccggtcgaacaagccgcactccatagtttcaaattattaaattgtggagcaactttttctaacaaacatttttcaaaattactaaatatttcttgattgcggtaaaattcagtcacattaattgtcaaatgctcgataaactccgctcgtttgattggatctttgtccaaaaggtgttcatattcatgcaacgagttgaccccgtttttatccataatatttttgatcctgcgttgcatttgtctttctttataatcatcgagatggatatgatatttctgctccacccacctattaaaatcagtaaaattttcttccaacattttaatttcacccaacgatcgtctgtagtattttcccgatctcatgcaaacttacaacttcatcgacaacttgagcttcaattgcagatcttggcattccaaaaacggtacaagattcctgatcttcagctattacataaccgccttcatccatgattgtttgcaatcctgccgttccatcatgccccattccagtcaggataaaagctgttaaattagcaccataatgagcagccgccgtttcaaacaagtaatcaacggctggccttgtcccatgcatcttcggacgttgatctaacttgagccggtcaccttggatcgtcatgtgataattaccaggacacaagtagatctgatttttgaccagcatattatcactagcctcaacgactgtagcgccgctttcttcatttaaacgctcagaaaacgtgcgggtaaatcccgctggcatatgttgtacgataaaaacaggaatgtttgtatgactcacacctttaataatttctaatagtgcttttggtccacccgttgatgagccgatcacaacggcttggggcctgatgttacgctttttatgtgctccgttgggtttggctttatgattggcagcaactggcggtttactagaacgtccgcaaatatttttgatctttgcatacagttctctgacccactcgtcttgaatttccatcaggttcacaggtttttcgataaaatcggccgcaccatattctagagctttgatggttactgcctgatcactgactgcacttagcattatgaccgggatagaataatcctttttgatctgtctaagggcgctcaagccatccataacaggcatttcaatatccattaaaattaagtcaaaatcattatctgcatcaaggatgtccaaacaatttttaccgtttcgtgcaattcgaaccgttgaaacactgggcattttattcaatatatccgagatcactttgcgcataaatgcagagtcatcaaccatcaaaatcctattcataaggtataagaatcctttcacatctttacttttctctcttaaacaacattctcaagtcatcaatgagcaaattttcgttaattaaaaaacagtacatagtttttaaatgtatctattttcctgtctcacgaccctgatcaaggtcgaaaaatcgtttaaatcgacgaccatggtccttccgctgctgccgcccgtatcttggccaactaacgggatctgcaggcttgccaactgatttaaaacagcgtcaacatttctctgaccaatattagctgtcgtgaggttgtttttaaatccaaacatatttgcaccaccagagatcttagcttgaaatttagctcgtggtgctttttgcttaagttctttgaccatcaggggtaacgccgtattggcatacttagccaagttcaaacctgaagtcccgttcttttcaaacggtttactatcagggagcataatatgactcaatccaccgatttttgaaactggatcataaacgatcgttccaatacaagaacctagccccacggtcattattttattaggcgcgtatgaaattttataatcagagattcctaccctggtttcgttagtgttctgcagcatcatccgtattctcttctttttctgaattttcagtaatggaatctacggatgaaatgatctcctcttcttgtgaagagttgaaaagataatctaagttcaactcgatcactacttcatcgcccatcttcaaaaattgactgatatacgggcgcttcagtgatgatctgtccaaatctttttcataatccgtctcagtcagcgacatgatccctacgatctcctcgacaaagatccccatcgtccgttcgctccaatgtgccaagatcaccttatagtccagcgttgcaggcgataattcgccgtaaagccgcttactaagatcaacgattggcaacatctgttcttgatattcatacacacctaatacatagtctggcaattccggcaacgagataaacttttcagtttcgatcactcgtttaaccatttcaactggcaaagcaaaaacttgcttatgacttttaaaaacaacatattgtcccatttttgtacccctctttaacttctacaactaagaattgacgctgctagttttttaatttgaaactgccgatttgcaaacgtctgatctcatcagcttgttgaagctgttcgacacttttttcgagttcttcgatcaaggaataaaaatcatccaagttagccgatacttcctgtgtacttgcagaagtttcagcgatctgtgaatccatttgctgaatagaattattgactgcatcttttttatctttgatctcatctgcatgtgaactaacatcggttaggccatcgctcaactgcgtgacatcctcggtgatttgttcgctagccttcagtacaccagaaatattcatctgctgttgctgactgcccttgtatgatgcatccagatcaacagtcattttcttagacttagcacggatcgattcgatcagttctctaatattagtggttgatttgccggattgttctgccagatcacggacttcctcagcaacgattgcaaagcctttacctgcctcgcctgcacgagccgcctctattgaagcattcaaagccaacaaattagtctgttctgaaatatcattgatcaactgcacgatattgccaatactttgaatatcttgattcatcgccgtcatttcagaaacaatcttcttttgactttctgtttcttggttccaagaccgtgaaacttggcgcatcatttccatgttttgaatattactttgctttgattcgtcagcatagctattcattttttcaattttctggcgtatctcttcaatttggtcaccaaaaacattcatttgagcaactgtactttgagaagctgttgcttgctgtccagcattagtagcaatagtccccatcgcttgacggacaccatcgatcgaacttttagcgtgcgtcgattttccacttagatcgttgaccattgtttccgactgctcagtttcttccttgatcccagttaataaagctgaaaatgcattggctaaaccaagcaactggtcacgagttttaataaacattgggctttggccgggaactttgccgatctcgtcgatctgactgaaatctccctctaccatcttaccgacctgaacagaaagtttttttaatccgccggcttctcctcctgttactgccgtatttttatgaccaaatagtacatacaagagatgcaaagcgactacaatgaccgcgagtatccaaaaccttctcatctccgctgtctgtgccgaacttaaaacaaaagcccgaaaaacaattaaaacaatgactgtccctaaaactggcaagaaagctacttcggagttagcttttttagccgtcttcttacgtttttccatttgttttccttccccatataaaagatttggtatctgtcataatactcacttaagcaaaacgacactccaatctgttatatcggttaaaattttatttttttaaccgtttaccaaacatagacatcttttggatcagaaaatcttgaatatccaccgtctggatcatctcggatcagttctccattttttagttccaaagttcgatgacgcaaagaattaaccatggtactgtcatgtgttgctaaaatgatcgttgtccccatctgattcaggcgaaagaaaatttgcatgatctctttggccgacttaacgtctaaattagcagtaggttcgtccgcgataataactggcggatcattcaataacgcacgagcgatcgcaattttcttttgttgcccgactgaaagttcctgaggcaaccgctcaataaatagcatcatttcgacactggtcaatacctctgccatccgctcttcccacttttcagtggggatctctagcgctgacatacaggtttccatattttctttgatcgtcaatcgcggtaaaaaaaggtctttttgcgaaacgatccccaattgacggcgtagtttgtatatctgttcatttctcaaatattcaatttcaatattgccgatccgggctataccagaatcaatggagcgttgagcacttaagatctcaagtaaagttgttttcccagccccacttggaccaactacataaacaaattcaccttgttcgatcacgcatgaaatatttttatttgcccaaacattgccatatttttttgttacatttttaagttcgatcaattttttctcctaaatcagtcggtaaagtggttgatggtctccatcatttcatctgtagatgaagcagcgcgggcattcatttggtaagacctctgtgctgttaataattctgtcatttgagtagccagatctacattggaactttcaagagttccttgcatcacactactacctgccccagcggctctaaaaccgccattggctaaatacaagttatcaccaactgacaccaatgaatgtgcgttgtttggttcaaataaacgtaaagaccctaaaacctgatcaccggatctgatcgttccgtctgaagaaactttcaagtcccctgctggccaattttgttctggcacccgcgcgtcaactgcaacccgatagccgttgctggcgatcaaaccaccgttagcatcacgatgaaagtctcctgccttagtcaagtatgtattaccatcgggaccaatgatcccaaaaaaagcattgccgttaatagccatatcaagtgcacgaccggtcgtttcaaattttccgacttgatcatcgactcgtgctcccgcggcatttagaccagtattcgaatcaactcttgcattagaattaccaagtgcaccgtcgctattagttaaattattattcatcagctcattaaatgaattgatgattcccttatagcctactgtgttttcgttagcaatgttatgtgaaacattatccagattattttgcaagccgttcaaacctgttctgttaatggataaaatagaattcaagttcatttttacttactctcctcatttcctacatgatctgttttctcaagcctatactaagtaccatcaagactcactgtacgcctgagaaaaataaccaactatttgatctagatccgacctagttggttgactgccttatccaaggtcgaattagtagctgatagcactttttgttgagcctgaaattggcgcccggtttccattaatgagaccatctcatcagcagtagaaacattagaattttcaagcattccagcttggaccggcaaatcaatttgctgggctccctgcccggtataaagcgttccgccgacattttgaagttgtgcatttgctgggaaagacaccaccatcaaattttgttgtgcttgctgggcatcaactgggccgccatttcgacctatcacttgaaaaccttcttcagtgatcagctgaccggcatcattcactgaaaaatgaccatcacgcgtatacgcgatttgaccatttcccattctaacggcaaaaaagccattgccttgaactgcaaaatccgttgccaagcctgtcggttcaagcgagcctttttgcatgtccagagcactgccctgaatttgattgccccatgtaaaaccgccaatctcatggcgggtttcatttttgggaccagcctggttattatgtaactgtgcctcgttcattgttgcttcaaacaaatttttttgcaggtagccaggtgtcttgatattagcgatgttaccgctaatattttcttgttgagcttgcaaaacattaaaactatgtcttaaagtatcaattcctctaatcatcattttcctccataaatccttttagttttccaactgcacgcccatggatctgtgaaacgcgtgcaatagaaacgtctaagaccaaactaatttctttaagtgtcatttcctgttcgtaatacaaactcaaaactaattgttctctttcagaaagcttgctgatcgccgctgccaactcctgtttcatttctgtttccaacaaatgttcttgtgcatcgcccgtttttttatcacgaaagatctcttgtctgctaggcgattgttctgctgaaaacaagacatcctccaaagagatactagccatataatgcaagctatcataaatatcgttcagctttttctgattgatttggagcttactgcataattctttgtcagtagcttctcgtttcaattcttgctctaattcctgcttagcccgataatagcgagtcaaattgtcaaatttataacgagacaaccgaccgtgactgcggatctcatcaatgatggtcccacggatccgtacataagcataactttcaaatggtactttcttttgtggatcaaatttcttaagtgcatcgatcaagccgatcactccagtattgaagagatcttcgtagtcataatcggagcttttaacagtgatccgagcgatgaccttttcaactaaaggcaaatatttgataacttgatcttccatattcatctcatacaagaaaaaagctcctttctgaaaataccgggtgaagtaattgtcttctatccttgttcctgcaaatatgtgttgcaaattggaatgtgacgcttactttggcatagtttgtctcacaaatcagaatgtaacgcgtactctggcatagtttgtgtcacaaatcataatgcaacgcatactctggcatagtttgtgtcataaatcataatgcaacgcatactctggcatagtttgtgtcacaaatcataatgcaacgcatactttggcgtagtttgtgtcgcaaatcgaaatgtgacgctttctctggcatagtttgtgccacaagtcagaatgtgatgcatactctggctatgtttttctcacaagtcagaatgtgatgcatactctggccagctatcttcaacacgccttcccacagagtgccttcctaaaattgcaactgcccgactgcctcgatcccgatttcatttgggatctcatttaacgacaaaattgccaaatctgggaagttaaacgacaacaactttctaaacgcagttctagtctgtggatttgtcaaaaggacaaaggaaatattttccaccagcattttttgattcagctgagtgatcgcatccaacatcttattgaccgtatccggctgcaaaacaggatacgaaccagttgctgtttttttaatactctgtgcaaccatttcttcaattttgggatgcacagtaacggcataaattttgttatcttcaccgacatacttgttggcaattgttcttcttaatgcttggcgaacgtattctgtcagcgtttcggtatctttggtgacggtcccataatctgccagagtttctaagatagttgataaatcattgatcggtaccttttcttccaacaaattctggaggaccttttcaacttctcctaagcgtaaaatatctgggatcaattcatcgatcacaacgttgctttgttgcttaatgccttccaataattgcttaacttcttggcgtcccaaaagttcaggagcatgtgagtaaataacttccttcaaatgagtggcgataacagtcaaaggttcgataactgtgaatccttgcaggtcagccgcttctttatcactttcattgatccacatcgcttctaaatgaaaggctggttccacggcttggatgccattaaacgggatctcatccccagtcggactaaagatcatgtatttatcaggataaatatcacccgtgccgacctcattgcccttgatcttgatagaataattatttgcatccaggtacaagttatctcggatcctcactggactgaccaagatccctaattcatgagcagtttgtttacgtaaagcaatgatccggctcatcaaactattgtcgatcgaactatcgaccagcggtatcagtgcataaccaatttcgatcgctaaagtttcgacttggaaatcggctacatcttcgtcttcttggacatcttttttcttttgtaaagccaaagtctgttttcgttgttgctcttccttaactttcttagcatcctgttgtttgatcaggaagctaacaccaagtagggctaaccccataaccataaagggaataaacggaaaaccggggacaagggataaaaccattaagatccccgctacgatccggaatatttgcggattgcgcaacgcatcttcagcaatatctttaccaaacgtactatcattatcagagcgagtaacaataatacctgaggcaattgagatcaatagtgaagggatcgaactgaccaagccatcaccgatcgacagcttgccaaactgtgataaagcttccattgcgctgagatcacctttcatagtaaagatgatcgttccaccaatcagattgactaaaacaatgacgatccccgcaatggcatcacctttaacgaacttgctggcaccatccatcgaaccataaaaatctgcttcacgttgcaggtcttcccgtcgttttctagcctgcttttcatcgatcaaacccgagttcagatccgaatcgatcgccatctgtttccctggcatagcatccaaggtgaaacgggccgacacttctgaaacacggccggaaccgttagtcacaacgaccaactgcacgatcatgatgatcacgaacaagatgatcccaacaatatagtttttccctgccataacgtcagcaaaggcggcaataacatgtcccccatcaccttgtgttaggatcgcacgagtcgatgacatgtttaaacctaacttgaacatcgttgtgatcaaaagtaaggttggaaaagtagtaaattccaagactgagtgagtaaacatggtgatcaataatatgttcatggcgatcgccatgttgatggttatcaaaaaatccaagactggcagcggaagcggaatgatgatcaaaccaatgatactgaccaccaaaagtgaaacgatcaggtcagctggtctgagtgcattcttcttagctgctttttgcttgtttttcatcagttactctctctcctatcaactcaaatccggttcaactttaaccagacttatattttatacttagcttcttcatccaaccggtagaccaaagcgatcaaatcagcgactggctcaaaaaactcttccggaatgaattctcctgcctcgatcttgagataaattgctcgtgccagcggtttattctcaatgatcggtacatcattttttctggcttcttctttcattttcatggcgacctcatcagctcctttagcaagcagctgtgggactggtgtttctgtcttatcatacttgattgccaacgctaaatgagtcgggttcgccaaaacgactgtcgcatctttaacttgggcgatcgagttccggaccatcgcctgatacttagctttccgctgcgctttgaccttcggatcgccttccatttgtttcatttcttctttgatctcttgtttagtcatcttcaatttcttagtccgactgaaactttgataggcaaaatctgccaaccccaaaaccaacaaaaccaaggcaatctgcatccctagttctttacaaaaattgagaataaaaaacaagatcttggcaggaccaacagaaccagcatttaaaatgtcacgtaacgtagatatgtatttgcgataacacagatatgcgatcagtaagaactttgccagcgtttttcccaggttgactatcgcatccagactaaacatccttttgaaaccacttaaagggttcaaacgtttgaaatcaggctttaatggtttagccgtaaataaaaaaccaatttgcacaaaattccccaaaaaactgatcaaataaccgacgaccaaaaatggtgctgccacgatcaaaaccgttaagatcgcctgcaagccaaccttaggtaggtctgcgtataagacctggtagttatccaactgctcgataaagcctgtcatataaggaaaaaacttgcctaatccaaattgccaagcaggaataaagataaacgaaaaggtcaataaagccaaagcagctgttaagtctggacttctagcaacatttcccttcttgcgcgcatctcttttacgcttaggggtcggtttttcagttttaccatctttatccatgaaataacctttcctttatcagactatgcctgacctaccgaacgcaggaactcgactagatactcatatgactgtgggattatctttcccaacaattccacgacatttggcagcatgatcaaaaagatgatcattcctacagtagatttaagagacaaacttaacatcagcacgttcatttgcggcacagaccgtgacaagatccccaatacaatatcgatcaccatcacagcaatgatcaaaggtgcagcaacattaaaagccatggcaagggtcttactagtcaaaatgaccacacccttaacacttgcattcgtcaaagtggcggttcctaaaggaacaatcgtaaaagatagcatcacagcgcgaaacaattccagatgcaaatttaacatgaagaaaactgccagtgccaaccagtagtacatccgaccaaattgtgaactggaaacttccattgtcctgtcataagcctggcccatcgaaaaaccattttgaaaatcgatcagggaacccgccatgatcacagcttgaaaaaccagttgactaacatagcccatggcaagccccaataaagtctcctttaaagccgccaaagcgaagataaccacactcatcgccttgaccttgccaactaaaggaatggcagcaactaccaaactccccccaacgatcagcttagcagtattaggaaaacttctttgtgataaaatcggcgctgtgaccataaaagaaaatatccggcaaatcaccaaactaactaattgtacttcggccactgacgtcacacccccgagatcaagcggaagatatattccgtgaattcttttagcgttgtgatcataaagtttccagccaagatcagggtcacaaaaattgcgaccaacttagggacaaaactcaaagtttgttcttgaatctgggtcgtagcttgaaagatactaatgaccaaaccaacgaccatcgcaactatcacgattggacctgaaactactaagattctgatcaccgcttcacgcatgaccatcaagactaatgaaacagacattaagctccccctctaactgaaactatgaactaacgattcgactaacaagtaccagccatctaccatcacgaataataataatttaaacggcaatgagatcataaccggcgacagcatgatcatccccatcgccatcagcacactcgagacgaccatatctatgatcaaaaacgggataaatatcaaaaagccaatactaaaggctgtccgcagctcactaataataaaagccggagtaagtgtcgttagcggaactgactccacatttttatagcgatgcttgtctttagaaacatctaagaacaatttgacatctttttttcgagtttcttttcccataaattccttaagcctgacctctgaacggttgaatgcttgtttttcagtgatctcctgccgactataaggttggatcgcttctttatagatatctgtataaacaggcttcatcgtaaacagggtcaaaaacaaagccaagccaagcaaaacttgatttggtgggttttgctgcgttcctaaggcacttctagtaaatgaaaggaccatgatgatccgtgtaaaagatgtcatcatgactaacaacagcgggaccacggataaaatcgtcatcatcacaaacacattaacgatctgcgacgaatttccgctctgtccactattgatcaaatcagtaatgccacgagaaacatcatcgaggccagctgcatgcactgaaactggtcggaacaagcaagccgttaaggacaacccgctcagtattttactttgctttttcgtagtcattacttctttctcttattctgcagcttgatcgtcttttgcttgagaatggccgcaaaatctattttttcactcgcttgatcatctgaactggtaaataattgctcaacctcttcttttgataactcagagatcaccgtactgccttgttctgccaagctcatcaagtaatagcgctcgatgacttgcacgatcccaagtgcggaagtttttgaaactgggattttcttgataactcgaaattgccgatcctgtggagcaacgaatttctgtaagtattttaaaaataagttgatcaaaacgatcacgataattaatccaaccaccattttgatcaacgacaacgttaactccatttgaatactcctcgtatgatttaacttattggatcacaaaatctgtcacataaacttcttgcactattgaactgccaaaatttttattaatagcctctttgacttgttctttgacctcatcgatactttgattatttttcaataaatctgcggccctttttggtttcaaaacacggatcatgctgtcacgcactaaaggcatgtctttttttaatgcttttgcttgatcatcgtcagccactaacaaagagacctttaagcgtaaatattgtggatcagctgcatcatccgttgccaaattaacaataaacattttgacgtttaccagacgctgtcttttagaaatggcagctcctgtttgcactttttcagctttaggttttgcgtcttgactattaaagtacttgccgaaaatgatcgtgccggcagcactagccccaaatgctaaaacgactactaaaacaataagcaatccccatttgatgccacctgctttagtttcagttgtttctacttcttcattcttcttcattgtttccctcgttattcccttcaaaaagattctcaccagaaaaaattcggtgacgatattctatgatcgcttccctaatttcaaacgctgtgtctctaactaccagcgttttcccatcgacaagcgtgattactgtatctggggtttcatcaattcgatagatcaaatctgggttcaaataaaattcttttcctttaaatgaagttaacaaaatcatgaacctgccccctattatttatcctgtacataaaataaaaattttaccttacaggttctttttccccttttgatcaaattgctgcgctcactattctaggacagctcctcaagccaggactttccgtctaaccaacttccacacacaatgctaaaaaacgcattatggcctagaagtccgttagtactcgagtcctacccggcttacctcgctcactatcttaggacagctcctcaacgcaggagtctgcgcctatctagtttaaacatcacggtgccaaaaacgcaccatgatgtctaaacccgatattgctcgtctcctaaccgcgttgtttcgctcactattctaggacagtttctcaacgcaggaatctgcgcctatccagtttaaacatcacggtgccaaaaacgcaccatgatgtctaaacccgatattgctcgtctcctaaccgcgttgtttcgctcactatctctttaggttgatcaattcttgcaacatctcgtctgacgttgtgatactccttgcattggcctgatatgctctgcttgtaacgatcatgtcagagaattcttgcgctaagtcaacgttagaatcttccaatgtccccgctaataaagtgttggtcccatctgtaccaggtactaaattattggcattaccagaatcctgtgatatttcataagtgctgttaccgatcttgcttaagccggctggattactgaacgtagcaatcgacactgtaccgatcacttcatcttccgcgccataacgcgcagtaactttgccatcaggaccgattgaaacgtgaccttcaactaacttttcaccagctgcattttgagctggtactgtaattggagttaacgctccgccttcctgtccgggagcatagcccatcacacgtaaaccatcagcattagtcaagttgccattagcatcgatcttcaaagcaccgttacgtgaataaacctgaccattattaccatctcgctcaaatactaaaaacccgctaccattgatatataagtccaaagcacggccagtcgtgttttgaataccttgacccatgtctgtatcgatcgcaccgacctgaaccccaagtccaacttgcttaccatcaataccgccaacggttgcacgtggtcctgaagcattcgcagttgtctgacttaaaatatctgaaaagttagcacggcttgacttgaagccgatcgtgttcgcattagcaatgttgttggaaataacatccaacctggtttgttgactcttcattcctgaaacacctgaatacaatgaacgtaacatttaaaattcctcctatttgtgtagcatctttttaaattttgctattttttaatcttttggttctctaacttctttgatggcacccatttcatattccgtaccgttgacggtcagcttggcaataccgccagtaaagttgactttatcaactcttccttgcttttcattgccttgttcatcaacaactgtgacattcttgcccattaaattgaaagcttgttgttgctgccctaaaagcaaagaattattcatcattgtcgacatattatttaattcctgtaaggtagcaaattgtgccatttgtgaaatatgatctgtaccactgctattggaatctccatctccggtcatggaagggttagacattgatgtcgctaagatcttcaaaaaatcatccattgaaagtcccaaagcatttttagcagcaccgttttgtgaagtactttttgttatctcactcgaactgccaagactgtttgcttgtacaccgcttaaattgtccatgaaatatattcctcctttgatcacgcatactctgagacgctcaaaccaacaaactgatcgttccgtgcttgatttgttcttcgcctggcaaatgttcttcactgaccacttgtgtcctcgtcttgtgcgaacgtgcaaatcggcgttgctgttcttgctcattttgcatgaaatcaccagctggaccatctcgctgctcgcctaaaagttcagaagtttccgccgtttgtctcacagtttcaacttgtttcaatgttttagtcgttggatcaagctgcagctgctccatgatctgctctaatttatgtgtgattttttgtaacatatcacgtgcagtactattttgaacttcaaattctaggctgactgcctgttcattcgtctttaccgcaactttcatctcacccagattagccggtttcaaattaaaaactatgctctgggtattgcccttactggataacaagcttttctcaactactggagtaagtgctttttgcaaatttctcacgacctgctcgaccggtctagttatcgttgttactttttgccccacattagcttgcgtaactgtcgcgcttttttgttcaactacgcttaccatacacgttctatctgtaagctcactaaaatctatgatttcagctgcttgtttttgtcctgctagcgaagctttcgtaccgatcaagatttttgaactaactgataaaatttccgctgactgttttagcgacgatactgaaagctcgtctgccatcgctgcaacttcaggtgatgttttaatttcttgtttacccagctgccctgctttagaaactaacgggctctcaatgatccttgtaggttgaaccgactcaacttccagatcagtctgctgagcagcttcctgcttgatctttgtgtccgaactcacaaccagatttattgtcgagttagattcttgaatagcctggctttcaccagctgacttagaagttaccatactaacaaagtttgctatctgttccttcaaggtcgcttgctgggttgcagacatttcatccaagtcaattacgctttgtgccggattttcgccaaattgctcggtttgttgtggtgcaacgtcattgtctgcaataatttcggctatcggtcctgccttggcttgctttaagtctagtggaggagcagcatccttaggtaatttttcattttttccggcgttatcattttcttggagcggttcgactgcttctgattggtcatgctcgatctctagtaaaatattttgctttttcaaatgatcgctactgctaactaattccttgagtccttccagcaaatcaggcgatatttggacttttccttgcttgaccaagtcatccaaagaaactgtaccgtttactaactgttggaacgttttcgagtcaatttgcaagacttgctctagctctttttttgtttgcgaatcagtagttttaatatgtttgttaagcatgtctttagaagtctctagtcgatttttagcctttttttgtctgaaacctttatcatcattaaccgcaatttccggcttatcttgtgctaaaaaagcctgaaatttccccgtttgttttttggttggcttggctttagcaacctgcaaaccagcaattttcttacctgtaactaccttttgcatttcattgtcctcctttcaaacccttgctttaacgtcaaggtcaagcgatatttacattttgttgtggccggtgaaaatcatccaactgcttttgttcctcatgggctagctccttttgatattgtgcaagctgctttgttttaagccgctctaatattttccgttgtttctgtgcttcgatcaattcactgcgaatttgctctttttgtgcttgcaaccccaacagttgatcgtgacaaatcatgatctggtcgttaagagcttgaatatagcgtcgtgtgacttgcattctgctaactgaaaattgtggagtttccatcatgctgtctttttcttgcatgacttgatccaattcagtatttttctcgttttccaggcggttgacttcagcaaaatgccccttgacctggtcttcaacttgcaaacgatattccagcactttttgtaatgaaaaattaaattcttccatccctgatctccctacccttctgcagtgatccgaccgtcacctaaaacattattcgaagcaaacaactgctgcaatctctcctctgtatctgtgaaacttgaaaattcatccacggcttgttgcaaaaagtcatcgatcggtttgtgcagctgcacagcatagtcgatcacaggatttgttccgctcttatatgccccgatatctatcaaatctttcgcatcagcgtatgttttcaaattttcacgcaattcactggcatggatattatgttcttgagagaccaacgatttcatcaaacgactgacactaggttgaacatcaactgccggataatgattttgggccgcaatttctcgcgataaaataatgtgcccgtctaagatcccgcgaactgcatcagcaatcggttcgttcatgtcgtcaccttcgaccaagaccgtataaaatgctgtgatcgaacccttgtcagacattccgcttctttccatcaacttgggtaattcggcaaaaaccgaaggagtataaccccgggtagttggcggttccccagttgatagaccaatttcacgttgagccatcgcaaaacgtgtgaccgaatccatcatcaaaacaacttttttgccctgatcacgaaaatactcagcaattgccgtggccgtatatgcacctttcagccgaactaagggcggcatatcagaagtagcacacactacgatcgacttagcataaccttcacccaagtctttttcgataaattctctcacctcacggccacgttcaccgatcaaaccgatcacgatcacatcggcctgacaatacttagcgatcatccccagcaaagtacttttaccgaccccactgccggcaaagatcccgactcgctgtccctcgccaaccgttaataatccatcgattgctcgaataccagtcggcatgattttttcaatgtcttgccgtttaaatggatctggggcttcctgcatcgctggatacccgaccatttcagactggtcaagcttggaacctttcaatggacgtcctaggccatcgaaagtatgtcccagcatttttggcccaaccttgacttcaagtgtcttgccagttgcagccactaggcaacccggcgcgatcccctctagctcatctaatggcatcaataagaccgtttgtttaacgaatccaacaacctccgtcactgtcttttttcccgcttttttcgcatagacctcacagacttcaccgacgaaggcttgcaaaccttcgactttgatcacaagaccaacaacttcgctgactttgccgtataccgaataaaaaggatattttttcgcttggtttaaataatttttaaaggggatctttatctttgtcatttatttacctcataattgttccagaaaaccttgtaattcctttttaatgtcaatatcaactaccgattcgtttgattcgacacgcagctgcaaagcatttaaactatcatcatcaaaaattatgtaacgcagatcaggaatttcttctttgacctgctctaacttagtggtcagtgattcatgataagcggagttagcccagaccatcaatacttcatttggtttttcgagttcgaataataatggactcaaaattgcagtgatcttttctggcgttagttccaactgcgtcttcaaaataatttcggccaactgtactgcaaaagaagtgatctcatcctgtttttctgccaggtactgttttgactctgccagactttgctccacgttatcttgtgcctgcttgactagaggtgccattttttgttgtccttttgtcacagcctcctggtatccatctttttttccctgagcataaccagaatcataggcttcttgcttgatttctgctgccttttgttttgcatctactaacatctcagctttcagctgttttagcttttgctggtaagctgccgtctgatgtgctaatttagcgtcaagagctgttaactgtggatcttgcttttttatttgaggaacaaaatctgctgtctttataccaactttcttaccatgcaggggcattgcctgctgtttcaaaatattattagacaatgctgtcttgacctcctcgaccaatatagatctcgcctctttcgtctaacttccgaataactgcgacaactttttgttgtgcttcttcgacagctgataatctagttggacccataaattcaagatcttctttgatattttcaaccgcatgttgtgacatattaccgaagataaagtctttgatacgatcatcgctgcctttcaaggccagctctaatacatcgtttgtcacatcacgtaatactttttgcacatccaacgcttgcaaagtagtaatatcttcgaaagtaaataggttggcctgaacttcactggccaattctggctgtctgctttccagaccggccaagatcgtcttttcagtactgcggcccgttgaattcaagatatcgaccaatgcgccgacaccaccgatactctcacgttcaccatcaaccacattggaaaacttatcttccataactttttcgatccgctgaatcgtttctggtgaagtggccgaaatcgttgccactcgttcagctacatcagattgcaattcatctggaaattctgacaaaacactggcagccttctcagcctgcatataacacaatatcaaagcaatagtttgtggatgttcttctactagcaaattaactaattgctgctcattagcacgacgggcaatgttaaacggttgttcccgcaactggatcgtgttcaaaacatccagaacttctttggctcgttgcggccctaacgaattaactaaaagatcctttgcgtagtcgatcccaccatccaaaacatattgtctggctgtggcagtgtcgacaaattcatcgatgacagcattcttttcttctggagtcacataatctgtattagctatttcataactgactttttgaatcatactgtcaggtaaaagtttcattacctgggaggacgcttctgaccctaaagagatcattaagatcgccgctttttttactccactcaattgagccatctcttatttcccctcctagtgatgatctttcatccaagctttcagcaattcagctgtaactgctggattagtctgggcataatctttagcctgtttatccttagcttgtctttctttgacttctggtttttcctgcagaggtactgctttttcctcttgttttgcttccggtaacggctcactattcgctgaagaagtaggtccaggttgtggtgaatcatcagttacatcgacatcataatcatcatcgtagtagtcatcatcgtcatcttggcgtttcttgcgaatgatcaaaaaggctgcgataccagcgattgcgatgacaccgatcggaagggcgatgtaccaccacggcacattattcttcaccgtcttagtcttatgaacttttggtgtcgtgtctggaacatctaaagcttgaacagtaactttatcaccacgatccttatcgtaaccgatggctgaacgcacaatacttttgatctgcgcctgctggtccccactaacatctccacgaatagcaacagaggtcgttaatctcttcacagttcccggtgcgctaacttgcttagtcacatcagtatctaattcattattgatcgtccggctatatgaagcgccattatcggtattatcgccagttacgttagagacattatcatcggtttgaccagtctgtgcttgttggatctgttcttggttcccattagcttgaacattttcactccgtaaatttggattgctatatttcgtagtcttgcgttccagtgcgtcaaaattaaggtcagcgttaactgcgacgctgattttgtttccatcagctaatgggcccaaaacacgtgtgatcttcttttcaagttgtttttcaaactgtttttggatctgcatatatttactgttcgcacctgtcagatcatcattgtcattattcccatcagccaatacatttccattactatcaacaactttaacgttttcggctgttaatcccttaacggcacctgtggtcaactcaacgatccctttaactgctgaatttgagatcgtgttgccattcaacgtcaatgcaaccgatgctttggctttttttcctttggcatcatcactaaagacatcatcatcaggcatcgttaacattactttagcttttttgacagcatttaaagaaccgatcgaacgttccagctcaccagtcgttgcccgctgatacatgatcttacggtcttcatcagtggtcatcatgctggtatcatcaaataactcatagccttgtgaactatcgggcagtttgttatcgacggccatatcgatccgatactggtcgacttttgtcttatcagctaagatcgttttaccatcatcttttaacttgtacttgatgtcttgatcttccaaatctttcgtaaccgtcccagcgtctgcgtcacttaaattcgaaaacaaaacggcatactcaactctggtgttcagataatatacgatcccaccagcagcaagtatgctgatcaaaccagctatgatagcaatttttactaaacgatttagattagaccatttgtcttttaagtttccaaaaaagtcctttactttatccacttccaagcccccactacacgactaaaactgcatgttcttaagatcgttataagcttccaaagctttattacgaacttgaactgcagtctgtaaagttaattgactttcagtcatattgatcatgacctgccctaagtcatcttgttttccactgatcatatcggtagtcgactgatccataactttcatgcttgaatttaaaccggataaagcatgatccaaataatcaccgaatgttttaccggcgcctttaactgtctgatcagaattatcgagtccagtaactttgcgcagttgagtagcataattatttaagccgttaataccattgacctgtgccattttatctctcctaattttctgatatttctagtgccttactcaagatctgcttattgacctgactcgaagcaacatttgcttcgtaagatctttgcgattggatcaagtcgatcatctcatccgccaagttaacattcggtaaatgaacataaccattttggtcggcatcggggtcatctggtttataactcaacttctcagtttgatcctgtgcaatgccagtcactcttacaccggaactctgtcgtttgttggcttccatgatatttccattgtctgcttcgacttgacgtaaattttcagcgaattgaactgacttccggcggtacgggccaccttccggcgttcgtgttgtattgacgtttgcaatattagttgatgtcgtatcaagctttaaccgctctaaggctaagccgctggcattgatctgcaatccattaaaaatactcactctgatctcctcttctccaatttagtcttaccattaatgattcaaaacataactcatcatttggtaacgccctttgagttgtgatgtcaacgcgctataattcaaaccattttgtgcctgatttaacatctcaacatctaaatcaacgttattgccattttctttaacagccgtatcattgcgcacgctttcatgcggttcaattgccccgcctgcttgcatatgcattttagatgtagtttttaggtgtgtttcttggtccaaagcattattcaaaacactttcaaactcgattcgtttagctttgaaacccggcgtattgacattagcaatattatttgcgttcaattgtgctctattagaagaaacgtttaaagcttctttcattaagccatatgtattttccaaaattaattacacctattttctttgatttaacactaatattttcaaactttttatatttcaattttcatagtagttgcttgcagccaagatgtcccctttatcaaactttttctatatttttcacagcattataattttagctattaacatactcacaatcaagttaatttttaagttattttcaattattttattaattatttttttaactcgtcgtttgtaaaattaagttagaaataaaaaagccatttgtggtagacttttgaatatccctaatcaaaagagaggtaaccacaaatgacttataaacatcttaccacatgtgaattaacctttatatataacttttggaaataagatattaaagcctatcatgccgctaaagctcttaaacgttccagcgaaaccgtttatcgtgtttaccggtttctagatgctggtaattcaattagtcaatttcaagaaaatcatcgagttaataaaactcattgcggtcgaaaagcaattgaattaccagaagatgaaaccaaatacattaagcagaaactcgcattaggttggacccctgatacgattattgttcgagctgagatacagatcagttgtagtatgagaaccttataccgactttttcaaagaggtgttttcaatgtgaaattgttgccaatgaaaggtaaaaggcatccaaatggttacgttgaacggcgtggtaaagctggccgactcggcagaagtatttatcaacgctatcaggattatcctcattttcaacatgaatttggtcatttagaagcagacaccgtccaaagcaaagcacatcaaggtgcagttatgaccttagttgagcgtctctccaaagttgaaatcattttaaacatccaacaaaaatcggctgaatgcgttaataaacatcttaatcaatggttgtcccaacagccaaaacaccttttcaagtcaattacttttgataatggtaaagaattcactggttggaaagaaatcgcaaataagcatgatattagtacttattttgccgaagttggggctcctaaccagcgtggcttaaacgaaaataataatggactaattagacgagatggtctcaacaagagcatggattttcgcaatttaccaaatgctttagttcaacaagtcagtagccggcgtaatcgtattccaagaaaatcattaaattataaaacaccaattgaggtattcatggaaaacatcacagataaacagctatgttatttctaacttaatttgacatttcaagagactaaaaaaggcgaactatcgcatttatgtatgccatttctgaaccacaaaaattttgaaagcgccttgattgctaatttatatataaatttaaagaatgtctaataaatttgcttgttaatatacaaatttaaaaattagtcatttttttggcattttttacttatattatatttcaaaaattattcttgttgaaataatttttgcgaagaaaatgagattttcttactgaataaccgaattacccacccaattttcatttttcgctattccatattgaaaatgtacttcaactattttcaataataatttgctcagtttatttttttatcactagttccactctcctatttttagcacgccccgctgatgtatcgttagttgctttggggttattttcaccaaaagcttcaattgagacgttgccttccgtcactgccttttgctgcacgaagaaccgcatgactgaaactgctcgagcagcactcaattcccagttacttggatagtctttcgattcttgtggcacattatctgtataaccagcaataatgacctcattttcttttagttgttgaatttttggccccagttcctttaaagctgcagcagaatcggcagtcagatccgcactaccgctgtcaaataaaatattgctatccaaatttaaatgtagtccgtcagacttgagtgaagcttttgtgttttttcccaagttcatctctgcagcagtttcgtttaaactatgagcaatttcttttaattgctgttcttgattctgttgtgaaatactgccctttactccattttcttgtttgatcgctgcttttttagttttagggtccggtgcctgactatctttttctttattagttactgatggtgaatcaagttcgattgcgtttgatccaccgactgccgcacttttatgattttgttgctctggtgacaaagccatgatcgacccaaactctgaactgattttttggaacttactatcatcgaccttggctgaagcaaacatcacaataaacagggcaagtagcaatgttaacatgtcagaataagggagcatccaggcttcactatcactatcattttttttctttttcttacgcatgcctgtcccactttctttccaatctactcatttttttcaatgtcagttcgtctggtttcactgatcatactttcaaggttcttttccattgttttcgctgaaactccttcttcgatcgccaatgtccctgccatgatcagttctaaattttgaatttcttgttctgatttacgttgcagtcttttagcaaaaggcatgaacactaagtatcccataaaaataccaaataacgtcgcaacaaaggccgatgagatcgactctcccaagacaccaacgttatctaagtgtccaagtgcaccgatcaagccgatcacggcacccatcacaccaagtgtgggtgaagtactgccggcagtttgcatcatggcagttcctttagcatgccgttcctcgatcgatgagatctcattttccatgatttcttcgatttcttctttatcgatcccgtcgaccaccatctccatgccgcgttttaaaaacgcatctttttctggatctaagttgttaacaggcgtttccaaggccaacaagccttcacgcctggcaacatttgataattctactaatttatcgatcgttgcgcggtaatcatacttttttgcttgaaataatactttgaaaattcctggtaaacgtttgatgtcagccagcggatatgtattgatcagcgctacaatgatccccccaaaaataatcatcatggcctcggggctaaataacatggctaagctagcaccttttaaaatcatcgctgccaccacgatgaccaacgcggcacagataccgatcagtaaaaacaggtccattttttctcctcctcttcactcttccattttatttatcggacaaaattgaaaagatttaaggaaactcattaaaaaaatttccaaaaaaataaaacgactacagaattaacaagcctgtagtcgtttcaactaaatattttgtttttggctaacttcattccaagtttccaataattcttctaacaatttaacaatgggcggcagcttttccttgtctttgctgacattagcggccactaattgttgcgtgataaagttatataaacgatttaagtctgtcgtaatttgactatcaaccgaatgatctaatgaaaatttcagctcatcaacaatgtcttgagctctaagcaattcatgatttgcctttaccatatcattttgattcaatgcaatttcagctaacttgattgctttgatgcccccagagatcaataaactgatcagcttgttaggcgaagcggtcaacacttgattcttcaaataaaaattacgttgcttttgtgcctgttttacatccatttattcaattcccccgccatcaatttaactattttgtaattccagcttgaagtcacggatcaatattctaattcgatcatcgtcccatcggtaattttttggtggtaagtcccacccctggaagacttttgacgatctaaactctttaattgctgcaacacttttttcttctctttcgccgttacttgcatcagactctgatattcagacattacttgttgtaaaaccactttttgctgcgctgacaagtttgactcagtttcctgcaattgagtcaataattgatcattggcttgtagtaaagctagaatggaagcagttgtttggtcccagtctttcatattttgctttaacttcgttaatatttgttcaacttctcgtttttccaaacttctgctcctcttttatgatcgttattattgttgatctacacccaactggctttgcatgtattgcatttgtgaatcagcttgcatcatgatcgagtctaactgggtaaactgtgcaatatattgttcccgtttatcggccaaacgcgcggtgaagtcatcgatctgcgagttcaagtctttgaccatcttatcaatgctatcgcttttattagtaatgattccctttttagtagcatcgttgctaataaattcattgaccaaactatttaatttagcagtatagcccgtgtccgtactttcgtcgaagctgtcctcaccttgaacatagaaaaagtcatggactttttccggtgaatcagcaagttgtgacttaaacttgtcttcatcaaggctcaaaacaccatccttgtcaacagaaaagcccatatcgaagggactcagactagcgccattgtctttatcggcttgtgtgatcatatttctcaaagatgactgtagccgttgcagagtcgaatcgccaaccagcttaccttgaacattagtcgaagaactttccgctgtggaagctgacggattgcccacatccaggtcacttttgatcaaactcattaagttattgtattgtgttacaaaatcagtagcggccttgactgtttttgaatcatcattcttcaaggataaagtgacggcatcttcaggcttgatctcttttttcaaggtgatcgtcgcaccatcgatcgcatcagagatcacgttactatcactttccatgtcaatgccgtctaggctatacttggcagcctgacccagatcagctgaagtatttaaccctaaggcagctaaagtagctgtattctttgtttgatccagtgttgtttctttggcacctgatttgttattcgtcaaaactaggcgcttgttgatcactactgccgaaacaccaatattttttgattctttattgatcttatcagcaatatcgagtagtgagtccttctctgtgatatcaatatcaacagtttctgggctatcgtcagttttttctccttgataagcaaaagtcagtttaccgttcaagttaagatcagtgctattcgtctctgctgcgctgacctggctaccagtcaacttagtttgcttagctaattgactgaccaacaactcaaaatcgccaccatttttggcgtcagaatttcctgagatcgttgctaggtcttcattcgaacttttagcaattttagaataataactgtcattattctgcaaggctttaagcttagtttgaaaattacttaaagctgatgaaatttcactccaggcagacttttcctggttatattttgtaaccttattttgtaacagcgttttaccgccagattcagcctcaatcaactgatcaacaacatccgttgtgatcccagagtactggcccaaaaagctgagccctgcattgggtgctgaggtagcacttgtaatatcagccatttacgtcactatcctttcttatcgaccgcaattcccatctgatcccagatttttcccaaaacatcaagcattttatgagaagggatctcctttaacactttgccgctttgcatatccaccatttcaacgtactgccgtccagtccgctgatgaatttcgaatttcattttaaaatcgcgacccagtaactttttattcaatgtatcaactgctttttgcagttcttgcgggtctacgactacattatcggctgaatcctcaacttctttaacgtttttaccatcatttaactgaaaaagtttacccaaatatttttcctgatctttacgaatgaatgattcatccattaatgaagtatccatttcataactatcagtcgcaactttctggattttattaatagccggcgtggggtcgactggtggaatattattgatctgcatgttacctgtcccttctttccgtgtcttacatatattcactccaatatttctagttaaattctcttttgatttagtcaggctgcgcgagtcaacttctttcggcttatctaagcaacagacttcgatgataagaacgtttcgaaatcagctgttccgacaatgcttggaagtccccgatatgccttcaccttgtttttagtcaggttacgaaatgcaaaagcttgcgcttaactaacttcaacaacaagtcgctaaagacatgacttattgttaaagtcccttaatgctcggcttcataccgcattttctccaccttgtttttcttagtcaggttacgtgagacagaaagctctgcctatccaaccttagcttcacatcgcaaaatacgtgatttgaagctaaggtccgatagtgctcactttctcccgtctcactccaccttgttattaaaaaaaccgaccgccgaataaacgacgatcggcctgtgccaataatattttgttagccctgaagtaatgacaagacactgtttggcattgcgttagcctgtgccaacattgatgttgcggcttgtgaaagaatattggacttcgtaaagttcatcatttcttctgccatatcaacgtcttcgatccgtgagttagcttcagaaagattttctgttgttgttcccaggttgttaattgtatggttcaatccattttgtgcggcacccagatcagcacgttgtcctgaaactgtttcgatagcagctttgatatgcgcaattgagtctctagcattggtagcattactcaagtcaacacctttacctggaacagctggaattatatgtccaggatctgtatcattttcaggtgttccaggagtcaaatcatcaccaacgcccaaagcatcagcatccattttcccaattttgacttcagcagtttggtctttacttgcaccaacttggaaagtaaatttttgattatcattattcaacaacttctgggtgttaaattccgtgttgttagaaatatcagtaatgttctttttcaaagcggtaacttctttagtgatcttaccacgatcttcgttagtcaaagtatcgttagatgcttgcactgccaaatcattcatccggctcaaaatgctatgagtttcactcaaagctccttcagctgtttggatcaaagaaataccatcttgagcattacgtttagcctgcttcaaaccaccgatctgtgctttcattttttctgaaatagccaaacctgcagcatcgtcgccagctttgttgatccgcttgccggatgaaagttttgccaaagaatcactctttgatgcattggctgcagataaacgtgaatatgtgttcaatgcagctacgttagtattaattctcattgtttgttcccccgaatattttgtattttgttgcttacacttattactatcggaatttattttaaatgtttaagtatgaaattaaacataattttgtttttttgtttaaaaaactgtccactccatacaagaagggacagctaaggtcaacctgtttatctagacagacttacattacaattcaaattattagccttgaagtaatgacaagacactgtttggcattgcattagcctgtgccaacattgatgttgcggcttgtgaaagaatattggacttcgtaaagttcatcatttcttctgccatatcaacgtcttcgatccgtgagttagcttcagaaagattttctgttgttgtacccaggttgttaattgtatggttcaatccattttgtgcggcacccagatcagcacgttgtcctgaaactgtttcgatagcagctttgatatgcgcaattgagtctctagcattggcagcagtactcaagtcaacgcccttgcctggatcttctttcgtaccagccccagcatcccaaacatcaccaacttctaatgtctcagcatccattttcccaattttgacttcagcagtttggtctttacttgcaccaacttggaaagtaaatgtttgattatccttattcaacaacttctgggtgttaaattccgtgttgttagaaatatcagtaatgttctttttcaaagcggtaacttctttagtgatcttaccacgatcttcgtcagtcaaagtatcgttagatgcttgcactgccaaatcattcatccggctcaaaatgctatgagtttcactcaaagctccttcagctgtttggatcaaagaaataccatcttgagcattacgtttagcctgcttcaaaccaccgatctgtgctttcattttttctgaaatagccaaacctgcagcatcgtcgccagctttgttgatccgcttgccggatgaaagttttgccaaagaatcactctttgatgcattggctgcagataaacgtgaatatgtgttcaatgcagctacgttagtattaattctcattgtttgttcccccgaatattttgtattttgttgcttacaaatatatatatcggttcagttttaaattgtttaagtcattttagaaacttttttagaaaaacgagttttaatctcagatacccattttcagcgaaaaaaagagccacatcttttatgatgtgactccgttcttgctatgaaatcaattggttctataatatttggtactgatagataaaaacttctatcagtaccaattttgttttatgataaaaaaatagagatgaagtccgcacttcatctccgaaaaacaatccctacactgaaaggaatgtcctacatggcgaattgtacactagatcttctcggaattaaagactcacgtttgcggtttgatcccaaatataaaaatgaggcaacaacttatgatttttacaaacaccaaaaagtgcgttttattcatctgctgcaatcttattcttgttcttgccccgtttgttgcaaaaaaatgaaacgtaacggctttaaaaccgttaaaatgattggcttaccttcaggtggtctgaccaatattttctcgatccgtaaacaaaaatatctatgcccgagttcaggtacatgtcctcaaactatcacaaaattagcggagatcaaggatgtcagagccaacaatcaaatctcacaagccgttaaataccaagcagtttctaaattaggtcagaatatctcacaaaaagacattgccgctgacttcggcatttctggcatgaccgtgatgcgctttgcgcaagaagtctctacttacttagaaccaaattatcattatttgccgcaaaatatcgcttttgatgattttaaatcaggcaatttttctgcaagcggcatgagtatcattgttatggatattgcgactcaccgcactttagacattgtcaggtcacggcagaatacatatttgcgcagctattttctgcaatatgaccgtcaagctcgttgggctgttcagactgttacagttgatctttatgcgccataccgttcttttattcatgaaacttttcccaatgcgatcattattgccgaccgtttccacgtcataactcaggcctatcgtgccttgaatcaagttcggatccaagctatgaaacaaggcggacacggttcacacgtttcccgtgctctgaaacattattggaagctcttgaccaaagacgccgcgcgtctcgattttaaacactatcacaaaagcagaaattttcgaaacagccagttgtgtgaacaagatatcgtggcacgtttattagacatgtctgccgacttgcgtttagcttacaattactatcaaacacttttacaagccatgcatcaagcgaatccagaactgttagaggaactgacccaatcagctgcgggaatgcctgcacccattaagcagaccaaccggactttacgtaagcatctgcaggagatcaaaaacagttttgaaagtgccttttccaatggaccagtcgaagggaccaataacaaaataaaaaccattaagaaaactgcctatggcttcagaaactttgcgaatttccgtctgcgtgttctagtggaattaaagaatagttacgtgagtttgaactttaataatcagataaaaaaagccgcccgttccattcaggaacaagcagcttaaacaagctagaccaattacttttcaattttaataatttatttcatcagtaccacttgataaagaaccaatcaatttaataccagtgattcttgacccaatgtttctgtgcgttagtccagctgccgtatctttgttggacatattgagccgcaactttttcttgattggcaggtgaaaaatcaccatgcaaataattttgatccagctgatatttgccaatatagcgtccatttcgagcattatagttattgctcgactcatgctgaataatataatcacgtgcacttttttctgccccagccaatgttggctctaaactgttgctagaactggcagaagcgttctcatcaaggtcaacattcgctagtgacgctactgttccagcatcattgaccatagaggtcggttgcgcagccgcacttatttgtgctcttccaggaatagttaagttctgtccggctagaataaaatccggatcgtttaactggttagcctgagcaacagcttgtgtagtggtgtgatatttctctgccaactcagagacagtatcgccctttttgattttgatcgtttgttgtgctgtttctaaagcattcgaaaactcagctgcttgctgcgaattagtcgcctgtgttgcggcttgcatcgacccattattatgaacttgcaggtcattattaactaaattcatttttaaaacccgtttccttctttaattactatcacgattcctaattatatagtgttttaaaatattttacagtatctttttaatatcgatcgaattaatttgcttttcccagcaattatattgaataggtagattgtaaaattaatccgaacgctgttcggacaaaaaagatcagcttcctttaaaatggtgtttaccacaaacccatcttttaggagctgatcttttgtctagtataacctattccgaacgaattaaaatcgaaaccttttgtgaactagggctgtccaatatccaaatgggcgttcggctgaaccgatcaccgtcaacaatttcttatgaattatctcgatgtcaaccttatcaggctgaattagcacaaacagatgccgaatacaagcgatcacgatgtggtcggaaaactaagctgagcgatgagttaaagcaaaaaattctcaaccatttacgtctaagctggtcaccaggaatgattgctcacgaatttaaactagctactaaatctatttataattggctaaatcaggggagaattggtttctccttgaatgatctacctgaacatggcgtacgccaacggcgtaacgttgaccaacgatccaaatataatcaatctttggggcgatcaattgaacagcgtcccatgatgattaatcaacgtaagcgcatcggcgattttgaactagatacagtcgttggtcctcgtgggcatagtaaggcagttttattaactttaatcgatcgcaaatcacggttcctttgggcataccggttaaaagatcggacgacagcgactgttaatgaagccctaactaagttcctaaccacttttaatggtccggtgcacagctttactgtggaccgtggcactgagtttagtgggctagtatcacttgaatcacaatatggtattaagacctattactgccatgcttatacgccagctgaacgtggtagtaatgaacgctttaatcggaatttacgttatttttatcctaaagggactcgttttgagcacattagtgctcaagatttaacgacgacgttactccaaattaaccagcgaccgcttaaaatactcgactggcaaacaccgtatcaggtgatgctgacaaatttgtccaaaaattcggattaaatttgcaatctaccaatatgtctttttttaattattgggactggtaaaaaaaaccgttttttggtatgcttgcactgagctagataataatgattataaataactaactttaaatttttatttggaggttctgaacatggcaattacacccacagatgcacaagacgtttttaaagatgctggcgagaacatcattttcgtcacccagaaattgaatcggcaagatgccgaggcggacaaagcggctgttaccgaattagcagcgcgcattccagcgatcatcaatagcatgaatatccgttacccagatgcccacttacgcgtggctttcgggattggctcggatgcttgggattacttattccctaacgcaccaaaaccaaaggaattggaacccttcaaggcaattccaagccctaaacatgatgccgtcgcaaccggaggtgatcttttcttccatattcgggccaaagaaatggcggtttgttatgaagtattagatcaaatgatgcaattcatttctgataacgcaacaacgattgatgaaacacacggattccgttacttcgaaggccgcgcgatcatcggcttcattgacggtacggaaaatcccgctatcgatgaaactgctaaatacgcattagtcggcgatgaagatccagaattcatcaacggttcatacgcttttgcacagaaatatatccatgccatggacagctggaaccatacttcaactgaagaacaagaaaaaacaattggccgcaaaaagttttctgacttagaacttgctgacgccgaaaagccaaccaacgcgcacaacgttgtctcacaagataacgaaggcggtgtggaacataagattgttcgcatgaacgttccatacgcaaaccctggcgaaaaaatgaccggtacttactttatcggctattctcgaacatggtcagtgacaaaacgcatgttaaccaatatgttcgtcggcaaaccagccggcaattatgaccacctactcgacttcagtgaaccaacaactggtgccctattcttcatcccatcaaaaacaacactagcaaaaatagcagaagaagaactatagagtgctgactcaaacgagttagacttttaggattaacgtaaaaacgggcattatggcgggtctcagccatgatgtccgttttgtagttaaccggaaaaggctgtttgagaagcacgtttgatataaagtgcgtttaaagcggtttgcctctgagcattagaatcgtaccgtgaatgagcgccaaagacgatcgtttacaggtacgtggctaagcgcaagaggcagctttaaaaagcacgtttgatacagagtgctgactcaaacaggttagcctttgaggattaacagcattattttctgagcatccaattaaccaaattgggtgcttttcttttactttttaagcctgttaattgacttaacaaccatttgattggtacactacacttactaataataagaaaatgaggctattcatatgtcagaaacaatgcacgctgttgccatccaacaatatggtgacgaaaaccaacttgaaatgattactttaccgatgcctacaattggtgaacaccaagtcctaattcaatctaaagcgacagcaatcaacccactcgactggaaattacgtgaaggtcatctcacaagcatgttccaatgggaattcccaatcgttcttggctgggacctttccggggtcgttgttgccgttggatcagccgtaacagaatggcacgttggtgatgaagttttcgcacgacctgccacttcaaatcgtggtacttatgctgaatacgttgccgttgatgacaacttaatcgcaccaaaaccagccaatgtcacttttgaagaagcggctgccgtcccattagctggcgaaactgcttggcaagcactctttaaccacggtcacctacaaccaggcgaaaccgtcctggtccaagctggttcaggtggcgtaggttcatatgctatccaattcgcaaaagcaatgggcgcccacgttatcaccacaactagtgcgaagaacttcgatcttgtccgtgaacttggcgctgatgaaatcattgactatcgaactgaaaaagtggccgataaagcccacaatgtcgatctcgttatcgacactatcgggggtcaaggacaagtcgatgcatgggctgtcctcaatcctgaaacaggtcgccaaatttcaatcgttggtgaagcgcctgaaactgcggccatcattaaagataccaatatgactttcaaagctatctggttaatgccagatggtgatcaacttaaaaagattgccgcattaatggccgatggtaaagtcaaatcaattatcgatactgtcttcccattttctgctgatggcttgatcaaagcccatcaactaagtgctacgaatcactcaaccgggaaagttgttattaaattctagatctcccaaaaaacaccgctaacctaataggctagcggtgtttttttaatcattgaataattgatcactttctttgtcggtacgattcccaatcgtataaatttcgaccattacgaaaattaattcgatgggtggaaagaaataaatagcgactaatagaatcacttgaatcacccagaaataaggtctagtaatcgtgctatagatcggcatggctttaattttttgataccgctcaggggcgacttcacgattggcgttcgccaatgcatcactcaagaagaagtaggccaataaccaaatcagatgaaccacgtagtaaaaatattccggaccgcgttcattgatgaaccgccccgtccaagccgttgcaacgggtaaaaatgacatggataataaccaaatattattcagccaataaatacgctttgttcctcgtttcgtcagcgaaaacatatagtaatgattataccaagcaacccctacgaaaacgtacgtaatgatatacgcaaaaaagtagggaccattttccaaaagtgccttaatttccggtgtttctggcgttttaaattccaagatcataatggtgacaataatcgcgatgacagcatcgctaaatgcttctaatcgacccttattcattctatacatccccttaacaaaaatagttaattttatattttacactatttaattatgatgtgctattatttatagaatacctgatgtaccagtgcattcaacaactaatccccaacaatcctttcaaagatacttaaaaataaattgatttcagccattaattaatagtataatttatctacgtagtaagggaggaattatcatggaaagagagtatcaatcacgcgcttcacttaaaaaagaagttaagtcattatttgctggtcattggggaaaggccgttacgttgaacatcatccccactctgctatcaattattggggtgattattgtcggagcagtcttgatggccatgattgccatcttcgcaaacaccgacccatcaatggctgccaatgaatctttttcgggccattcgtctggtagtagttttgctggtcaaattccaagtttcattttggggctcattacacttgggattaattttactttcttagattggctccgttcgaaagatgctgattttagttcactcaaaggagctttcagtgtcttctcaaaacgttatttcttgggcgcttttctaattcgaattttagctagcttatttacattcctttgggcattgttattcattattccggggatcattaaaggctacgcttattctcaagcttcttatatcttcaaggacttaacagataacgatccacaagctgacgttagctttttagattgtatcactaagagtcgtgagttaatgaatgggcataaattccggtttttcgtcttacaactaagcttcttaggttgggatattttagctggcctctcacttggcattggctatttctggttaacgccatataagaatgcaacttatatggcattctacaaagatcttgcaggcgatcaatttttacagacaacttctgcagatgaaccaactgaagaagttactgttgaagcaatttaaatgaactcaagacgttcttaattgggcgtctttttttgtattatgcggtgattagcagtaggcttagactaaccattttattcagaaaggatgacgtcatcatgaccactaatcaccaaatccaacttgataccgaacataattggcacgcagtgtctggtgaaatccctacgcctaaacctgaagagctactgatcaaagtcagggcaagtagcgtcaaccctgtcgaccttaaaagacgagctagcaccacaaccattttaggctatgacgggtatggtaccgtgcaagcggtcggcgccactgtgaccaactttcaacctggcgatgttgtcttctatgctggcagtacccagatcgatggcagtttccaacactatcaatgtgttccggccgcgatttgtgcgcttgcgcctagtacaatcagtgccgcggagattgccggcttaccgcttgtttcgttaaccgcctatgaattactttttgaaaagcttggttttaccgctgaacaaaatgccaatcgtggcaaacaactattgattatcaatggtgccggtggggttggatcaattctcagtcaactcgccaagtgggccggattcaccgtcactgccacaagcagtctcactcatttcgactggctaaaaacaaacggagttgatcacccgctggattatcattcacctagcagcttagacaacttagccagtcttccggataacacctttgatgccatcgcggtcctttatgatattgaaagctatctccaagaggtcgcacggctgattaaaccgtttggacaagtcggtacgattgttggcaatacgcatccacttgatctcgcaccgcttaagcctaaatcagcctcattttcatttgagtacatgttcactaaaacggactatcaattccaaaccactagtcaaggggcgattctccaacaaattgcgcggctaatcgatgcgcggattctgcatccaatcaccaccgcccactacacaggcttaacggtcgctaatctccaaatgattactgataaactgttaactggccatactactggtaaacagggattggtctactaaacgcaaaaaagccgcaaccaaattggttgcggcttttttaacacaacagtcatcgagttgcggggattgaacccacatcaatcattcattttacgcttcgcttttaatagccaatcgcttttgattttcttggaaggaatttcaatttagatgattggttctaccgttaaactataactcattgggtgttgctaagacacttctttagggaggaattgtctcataaaattaacttgctcagattcacttacttgggagatgcttatctgatatttatagaataccaagcagttgggaccaaattgtgaactttcaagtatgaaatgatgtccgttaaaaaaagccccaccactttggtgagggctcaattttatagctcatcttccgtcgccaacaaaccatacttcactttaaagcgactgatgattcggtaccacgactgataaaagaagaaaataaaaaaaacatttgataaagcatgggccaagtcaaaatagaaactcgcgacataggctgcaataaaagtcttaatcgtcagtggattgacgtatgcgacaaaataccacagattcataatccacccaaaaataaagccccagacaaacccaaaaatacagagcaagtatttattctgtgcccactgatggcgactaattaagcctgccgtaacgcccatcatgccccagcaaaacatttgccatggggtccatggcccttgtcccaaaaacatattcgagacaatcgcggcggtcgaaccgacaataaaacccgattctggaccaaggactaatgccgacacgataatcacaaaactagttggctgaacactgggcaatggtgcaaatggtacccgagtgactgccgcaatcgccgctaaaaccgcgatgaaaataatttcacgggcgcgaatatcccgggtttcaaaccgccaataaaatggcagcatactggcaatcaaacagataaaactgaagatcagaaaatgctgtccttttaaagtgacgataaacaacatgaaaatcgccataatcaagaaagccaatccaaacgtggtccaactattttttaaagctttcatgcgtgcacctcttcccaattcagggcttcgggcaattgactgcgtaacattcggttgatggttgtcgtatagaagaagttatgcgcgaaaaaggcataaggttcttcctccgatacaatcgtcccatcgaataataaggcacactgactagcaaaccgggcactaaaggccatatcgtgacttgccataatcaatgttaagccttccgcttgtaaacgcgttaacaattcacccaacgcccgtttgcgaatcggatcaaggccctttgttggctcatccagtaagagtaactgcggctgcgctagcaatacaatcccgagtgcaatcaattgttgctcgccgccactggcatcttgcgggttacgttcagcaagggtttgaagaccgagctttgctagcatctcttctgccacttgttctggtgttgcgcgttttaactgccgcgcccgttcgataaattcttgacggacactatcataactgaaatgatcgctcggtgtttgtgagagataacccactgttttgaaaagttcagcttgcgcccacttaccgatcttcttcccctgtaacttgattgcaccatggcgcggttgtaataaaccaatcaaaagcttcaacaacgtcgatttaccagtcccatttttaccaacaatcgctaaccaatcgccggtatgaacctctagattgagctggtctaaaacataagggtcatttttttcatactgaaaactcacatgtttggcctgcagcattgttgcttggtcgttcgtggctatttcacgtttagtatgtgttaactgccattgtcgccgctcaatcaattgcttgccactgacaacggtcaatggtaatgccgcaatatcagctggtgcaatcaactcattttgtaaaaagacgtgtggcacatctgggacgaattcacgcaatgccggttgcgcccaaattgctgctaatccaccagcaaccggtccttgatacgttatctcaccgccatccatcaaccaaagttgattagagagcggtaaaatatcatccaactggtgttcactgataatcacggtgatgccgagttcgtcatgtacccgttgcaataaactaataaattctttggtcgcaatgggatcgagttgcgctgttggttcatccaacagtaaaagatccggctgtaaaatcaaaaccgacgctaggttgaccagttgtttttggccacccgataaatcatgcacggaagcatacagcaaatcttggaaacctaaaaagctgactaattcggcaattcgtttttgaatattcgcactcttttcaccaatattctcgagtgaaaaagcgagttcctgaatgaccgtatccatcactaattggttatccggattttgaaagaccatcccaatcttctgcgcacttaacccttgcgataaatcagctaacggttggccctcgaaaataatctcacccgaccgtttaccaacgggccagagttcttttttgagttggcgcaataaggtggtcttcccgctacccgagttcccagctaacgtaatgaagtcacccgtctgaacggttaaattgatgtctttcagattttgttgggttgccaatgcatactgaaaattaaattgttttatttgcgcaatgtccaccataaatattcccatccttctagtaatagcggcaaactatcaattaataagactaacaccaaacatagccaaccaatttgattcaaatgaatcgagccaagtattggataaatcgctaagcggccaatcccctgtttagcaaaataaaaacaaagtgcactgcctgctacaagacttgccaatacccaaccatcccgttgggtaaatcgataacgttgataactcgttcgcttctgtgacccataaccacgggccgtcattgaatcagccgtttgtagtgcgtcaaccaatgaattaatcaataatacttccatcaaacgcatcccggcatgtgatcgggctctaacactccccgtttccatctgcacaccacgtgttctttggacattcttgatattggtaaaccgccgaataaatagtgggacaaaccgcatggtaatcatcgttaataaagttagttgcggtgaaagccgcacaaataaatataagaacttatgattcgtcatactctgattataggaaacaaacactagcattaagatcgccagcgaaagcgccattaaaaaaccgtacatgacagcctctgctgtgatcaccgtcccaccaaacgtcgcaatcacgtgcgccccatgattattcataatagggttcatcacgacgataaagagcatcatgaacaatgcaccctgcaatgtccccagtgttttcttctggtttttcgcaagcaagttcactgcaatcatcatcaacaattcacttacaagaaaaatcggatgaataaaaaccattgagaacgcaattgcaatcacgtaatacgcaaagatgacgattggatttaattgatcaaagaccagttgcgattttaaccctgaggcgcgttgcgatcgttcccgagattttccgtatacatccaatcaatcacatctccactcttaacaggataattaccacaagaatagttaggaaaactgccattcactcgataaagccatccgcttaacggtcctttatcaaattcgaatagcccattaatgcctttgatatagacgccgccgcccgtcccacgataggatagtgccatcccgcgactttgcaaatcacgttttaaaacatcaatcaccatatccccatccttgatttcaacttgatcaccgttcaaccatttcggattaccttcactaattggtccataaacattgacgctcaccttttcaaggactggttggggcgtcgtagtgggcggtgtaactggtttactttcagttgattgtgacgattgattaatggcggattgggtcgatgccgattggactgccgagccttgttctacagcttgttgcgatgctaattgtttgctagaggccgatttttgtgatgattcatttgtctgttcagattgactgctggacttgcgcgtttcagctgttttccgactttcagataccgccctactatgtgactcagaggccttagatttaactttaccatctaaaccaacagttgctggcttgacccgtttttttgatctatgttcctctttaacatgttgactacgcgtagacggattatcttgagccacactttgataggtaccgtatccgatgccgcttaaaataactaaactaccgataatcgcaatgattctctttttagacatatctaactcctaacgatgttcaacttgacgcttgaaccaaatgccaataatcccagtcaaaagtatcaagccggctacagaagcaactactgttgagttaacacccgtttgtggtaattgcttttgctttatttgagcatgatcttgattgtctgcttggtgtttattttctttttcaaccgtagtcacttgtcgttcaaacttgaaactgattgtattattcgctgcattaatcgtgatggatttggttggcgtgtcttttaattgataaccctcaactgcaacatcagatgcattaatcaacattgtgcgtccaactctttgatgctgcaattgaattgttttaaacactttgccgttttgatcgactgcttgcaccgtaacgtcagcaaactgcgctgcaggaattgtcccaatcatttgtttccgatactggaacgtcacggtcgttcccgttttagcaacttgaacagtttgttgtgcattgcctaataattcataaccctcaactgcgacttgattagcattcaccgtaatggtttgaccaacgggttgttcagctaattgaagactctttaaaatttgtcccttttcatcaactgcttggacctttaccgatgctttttcaataactggcgttttaaaatcataaattgagccttttcccgcttggaacaaccggtattgggctaacgtataaacggcttgttcagttgacatcgctagcgatcccatatcgttattaatattccagcggaactgtccatctgctctttgataagcgaccagccgtgaaatcgggttagcgccttgatcgccaacaaatgttgtgactggatcaactccagctgcaattaagcccatgacaaccattgccgtactatttgagttttcttctgtcatataaacattagggattaaaaaaccacccgtttgtgcaacaaatgttttttctttcaacatcgttaccgctttatctagcgcatcttgaacgcctgggaagtcacgatgcatccccaacgccgtcatcgtcatcccggtcgtatctaaatcacttttactaccgaaaaaagcccagccattttcagcgttttgtgcttgtaaaaccgttggaattaaactatcaatcgcttgctgtgccttggcaccataatcacgcatgctaagggcgatgatgccgtaaacttgcccgttgatcccaccagttggtgctttttcaataattttatcaattatatttaaaccagcgaagttggttgcatcttcaccaagtgctgttaccccaattaccaacacttctaaatcggttgccgaaaaacgttgatcagcgagcattgattgtgcatccgcaaccaaggcattatgataactcaagcgttgcgctgcactcagtgtcacgcctgattgaatagctgctaacgctgaccatgcatctggttggccattattcaacaactgttgcgccccagccaccattgctttttgataatccgtactagatgcagtacgtggtgtcacttgtgtaacctttgtctcactcgcagacaccgtttgtgcactaccaataactgaaacaacaggcattattaacattaatcctgtccataataaggtaaaaaattgttgtcgcttcttcatttaactctcctcattccgattaactttgataccctataatttaccatatttaggagctagaaagttggccctataaggttaatcttcacaaatacgccttaaaaaaaacttcatttcaaacacaatttattcatatttcccgcctaaactaatatttattcagttttaaggaggaaatacttatgaattttatcaagcgtgcttggcaaaacgtcatctttaaaaaagggcgtagcttcttattaataattgtgatgaccgtcatcatgatttttatcatggctggtctattgattagaaatgcagccattacaaccgtcaacaataccaaacaacaggtgggcgctagcgtcaccctttctgcaaatcgcgatcaagcgtttaagaaaatgcgcgcctcggctagcagtgatgccccaagtactacagcaacgcgccctaaattaaccatgccctccgtcaaattaaaagacgtaacggctatttcgaaattatccgggctggcaaattataacgtcagcgtcacgacttctgcgaacgcctcgtccattaaagccattacgacatcaagtagttcaaataatagtggtggcatgatggacggcggccctggcggcaacgctgagtcatccacttcaacaggtgacttacaaatcaccggagtgctcaataccgcaaccctcagcgactttaaagataatacaagtaaaatcacgaaaggtcgcgctttaaatagtagcgacaaaaacactaataatgtcgtcatcgaatccgaattggctaaagaaaacagcctcaaagtcggcgacaccattaaagtcaaagccagcacgacaggcaaaaaagcctatacgctaaaagtagtcgggatctataaggctagtcaaagtagcgctggcatgggtccacaacaaacagaccccgcaaacgtcatctatacggcatacacattagctaaccaaattaaaggtcaaactggcaaagtggatagtgccacattcacgcttagtgacccaactaagaaaaatagttttgtaaaagcagcgaagaagattatcaatacgaagaaattcacggtaacagctgatgacagtacttaccaatcactcaaacaatccatgcagaaaatggccagttttgctaataagattgtttggttagtcgctatcgctggcactgttatcctcgcattaattattatcttaatggttcgcgaacggcgttatgaaatgggcgttttactctcattaggtgaaaagcgcgtcaaaatcgtgggccaattattagttgaaatgttcatgctgctgattgtcagtttagctttagccggcattggcggacgattcgctggtcaagcgcttagcaaacaagttatgcgttccgtcacaaccgaaacgacaaccagctcacaaacaaataacatgcaacctggcggtaacggcggccctggtggcggtcaagcccctagtgggcaaactggtggcaatcggccaagtggtcaaatgcaacaacctggccaatctgctaaaaaagccgtcaaagcaagcgaccttgatctgaagattagtgccgtcaccttaatgcaacttggcgcattcggcttcaccatcatcgcatttgccgtcttactcgcatcactcaatattttacgactcgagccacgcaaaattctcattggataattataggaggtccactatgttaacagctaaaaacgtcagttactggtacgatactgaagaaaatacactttacaaagatgttaatctcgattttgaagccggcaaactttacggcatcatcggtagcagtggtgctggaaaaacgaccttactcaccatgctttcagggttagataaaccgcgccgcgggagtattttatacgaaggtaccgatatccaaaaaatcgacttaacccaataccgcaatcgctatgtgtccatcgtgttccaagcctacaacttactcccctacatgtcggcactcgacaacgtcttgactgcgatggccattactcattcgacgcatgaaagtgccgccgatttcgcactcgaaatgctcagcaaggttggcatcaatcccgaactcgcccataagaacgtacaaaaactatcaggtggccagcaacaacgcgttgcgatcgtgcgcgctatgtgctgttcagcccccatcgttgttgccgacgaaccaaccggtaacttagatgaacaaaatacgcaggagatcattcatctcttccaagaattagcccatcaacaacaaaaatgtgtgattcttgtcacccatgaaaaagaagtcgcagcaagttgtgatgttcagtatcatcttcaaaataaaacctttcaaccagttgcttaactaagtaaaaaacgactgagcctgtttacggcttggtcgttttttaacgggcatgctatactgagggcaatcaaaaggagggcttctaaatgctaacaatcttctatggttcttttagccatgctggccaatcatttattattgcagcaacccccaaaggtatctgttttgttggttcacccgatggcactatcagtgaattaaccacttttcttccccaaacgaaattagttgcaaatcaagctgcaatcgctccttatagtgaatcattaacagcttatctcgatggtgaccaaaccacgtggtcactgccaattgatattatcggcggcacaccttttcaaagaagtgtttgggtcgccctacaagctatgccatatggtcaaaccacaacttacagcgctttggcagctcaagtcgggcaccccaccgcaattcgcgcagtggcttctgccattggtcgcaatccactattaatgattattccttgccatcgcgtctaccgtaaagacgggcaaattggggggtatcgtggcggacttgaattgaaacaaaccctccaccagcttgaaactcaaaccaaataaggggattaatttgaaattttatcaataaaagtctatacttattattaagtcggtggtagaatgtacggttactctactcctttcaaattaagaaaaagagatgattattacgcaagtaactgatgtttatgggttaacccacgaaaactgcaagctgatcgaaactgaaaatgattttactcgcatcttcctagctgaaggtcctgatggtacacgttatacgtgtttactacctgatgcgaaacccaatccaaagtcaaaccaacactttgaatatggtaatccagcagatgcaccatactagatactaaaaaagcgccaacggatattagaatccgttgacgcttttttgttgaaacgtgttctcgccagcatatttctgcacttaaccaaatttaccaaatcagcgattacatcgccaatttggtaaatccagtcaatgctcagcactctattctgccattaatatatccaagaattgttcgccgtatttttctagtttattttcgccgacccctttgacatctagcatttcagtcaaggaagttggcatgatttcacacattgaatatagggtcttatccgagaaaatcacaaacggaggcacaccttgttcttccgctaaatcgcggcgtaactcacgtagttgttcaaataattcattatcttcaggcaacgttttttgcactttgaccgccatcttgcgcgtcactttcgcttggccttttaagactgcaactcccgccgccgtgatttgcagcactgggtattgaccgccagaagcttgcaaatatcctgaagcgactaagtaatcgatcaaaccactgatttctttttgcgaatcaccacgcattagaccatacgttgggagttcatcaaagcggaattgcatgattttttgattcttcgagcccgtcaatacttgcgccaccaacactttgccaaaccgttcatccatccgtttaacgcacgataagactttttgtacatcaatcgtgatgtcttgttcttcacgcgtatccagacagttactgcaccggccgcacgcttcacaatcatcatcaaaataattgacgatgtactgttgcaaacattgctgcgtattggcgtactgcgtcatttcttgcaacttggcatattcttgttgcttatgcgcttcgtccatttccgactgatcgataaagaaatgctgaatctgcacatcattcactttaaataatagaatcgcttcactcggcaagccatcacgcccggcccggccagcttcttgatagtaagcctctaaactcccaggaatctgggcatgcacgacaaagcgcacattacttttatcaatgcccatgccaaacgcattagtcgcgaccattatcggtttgcgatcatagagaaaatcctcttgattctgacgacgcaccgcttcgtttaatccgccatgatacattgtcacatctaacttagccttttcaatcagcttcgtgagccgttcaacttctttccgtgtgctggcgtaaataatcccggatttttgtttgttgacctttaaataatcgattaagtagcgatcactattttgatttttaactacttgaaacgcaagattctgccgtgaaaaccccgtcttaacttcgtgctgaatgttcaaccgttgcatgatgtcagctgccacttgtgaggttgccgtagcggttaaagccacaatcgttggtcgttggcgcatactctgaatcgtatccgtcaggcgtagataacttggccgaaaatcgtggccccattgcgaaatacaatgcgcttcatcgaccgcaatcaaatcaatcgttaattcagctaaatcagctaaaaagtaatccgaatccaagcgttccggcgaaacatatagtaatttcacttcaccacgcgcagcttggttaaagcgttcttggacttccccctgcgttagcgtactattgataaacgtggctggaatcccattttcattaagcgcatcgacttgatccttcatcaaagaaatcaacggtgataccaccaacgttaaaccgggtagcatcaatgctggtatttgataacacaatgacttcccgccaccagttggcataatcgccaagacattagtgcctgccaacaatgattcgatcacatctgcttgaccttctctaaagtgatcataaccaaatttttcttttagtaccgcttgtgcttgcatgccatttctcccacccgttaaaattcctaccttctatcataacaaagattcgttaattccggttaattgaatctcagtttcaagcattccttcaatcaattcttactggctgacaaaaccagcgatttagtgtttaattagaagcatcaaagactgtcaggaggcttcctatgaccttggaaattaatgcaacattaacggctacccaaacgatcgtcgatttaatcgaacaacccgttactcagcttttaattgaacaaacaccggctaatacaaccgcattcgcacaccccgctttattcctcggttttgcgcagcaacaactgcaacaaattgaacaactctccccacttgaaacagcctcgactgatcaagttgacacgggtatctggattaccatggatcctgagtggactgaacaaattggctacgtagggcagctattagccgaacaaaatcaaccaccgataacgagcacctcgcttccgtccaacgtctctcaaaatttccgaacaaccttagctccagccgttgaagccatcatcttggtcctcagccgctttggttatcccctgaccaaaagcgtaccagtcaaagcaaaaccggctaaaacacgtcatcgatggacaaaagccgtcagccaaatcgaattcactgttgctacgcgcgaagcacaaggaacagccatctggcaaaagcgcaaagagatgttattgaaagcgggggcacaattgtggccaaccgcgccacttaataaggatggctcgtttggctttgctgctaaaatgggcactcacttgcgcaacgaacatgcagcgcaaattcaagacaatcaaacgactgaagacattattttcaagagcgtgaatgaaatcggcctcttcttgtactttggtggcaccaatagttggctcgaactatgcgacacaaatggtcgctcaattgacgactggactaaaatctaaaatagaaaagagattcaacatgcaaattatcagttctggcattcatcacggctacttcgacgacctctacggcggtcatggcactcaatttaacgcggaaggtgtgccaacttattccattccgtttaacattcaagacgcacctagcgatacagtcagttatgctgccgttttctacgatctagatgcctacgaagtgacgcaagggtttccttggattcactggacacttgccaatttaaaaacgaccactgtcgcggctaatgctagccaacaagcgcccgatttcatccaaggtgttaatacttggcacagtcccaaaacagaccatttatcaacagaagcaagtgcttgctacggcgggatgacaccccctaaccgcgatcacacttatacacttaaagtatttgcacttgataccacgctcgatttacagcctggcttttacctaaatcaaatgacagcggcaatgcgcggtcacatcttagatagcgctattttagaagcacaataccgccaatttaaacattaggtgacaatggccttaactcggctaacacttttgtcatctgatcttaaaatcgtcgcttttttacgcttaacatcgtatgataactttatcaattcggaataaggagttctcattcaatgaaaaaaacaattagcattattgcggtaatcgccctcatcatcgtcggatttgctggctaccgttaatacaaaaatacgtatgtcggcgaagtaggctacgccaaagttgctgctcaatctccagctaaagaagccaccaaagatgattcaggtaaaacagtgactaatatgtatagctatcactaccaactaaatgtggtgaaagaagatggtagccaccaagtggtccctgtcgaagttactggcgaaaatccaacgccactcactcccaacagctatgtcaaagttgaatttaattcaaaacgcgtcttaaaagggcctaatactgtgtccaagaatcaaattccggctaaagttctggcgggtttagataaataataaattagcttatcctagtaccattaatacttgttattagctgttaccctcttaaattaagttattaaaaagcagtacccttgattagttatcatgggtgctgctttttgtatgtttcctgtgaaacattttgttttgtttgattttctttaaggcttcacgttgggcgaagattgttagttcgtgttcttcaacaaacgtcatcacccactcagggttttccttactatagttacgtaaagcccagctaattgctttttggataaagaactcatctgtgtcaatatctgccagaatggcttcttccaaaaacgccacattcgttttttcgtaaaaactgagttgtagcgtaatcgcaatccggcgcagccagaaattctcagcacctataaaatgctgtacaacccaatcaaactgttcaggatgcagtctgatgtactctccaaatacttttcgccaagcatcgatgctgtcccaccaaactttttccaacaccaacgttaataaatgttccatatcagccggttcccaccaacgtactgaacgcaatgccatctcgatggcaacatattgatactcacgcgttggtcgagcatataaggtctcaatgaactgcattatttctgctggtggcaattgtttcacagactgccacaattcgcgttcaattaaatggcggtccggtgctttaacaccgttaaattcaaattgactctgcatgtatttcttcattgccgcctgattttctggatatatcggtaattcaaaatccatggttatccctccactatatcgcctctaaaaaacttgtgccgtttgtttagctgtttcaatagcttcctgcataatcacgttagctttttctggcgaataatcaattccttcgatactaattttaatgacttcgtcaacaccggcaaagccaagaattgttttaacgtattgtgttgcaaaatcttggccagcataaacgcttccggctgactgaatatgaactgcttttttcccagttactaagggctgcggagctgtttcagtatgtctaaatgtttttccagccaccatcactgtgtcaatccacgctttaagtttcgtcggtacatttaaattccaaagcggattagcaatcacaaacttatcggttgctaagaactggtcggtatagcgattaaaccgagcgaccttctcttgctgactagcgcttaaggtggccatagcttgcccttttttaacgccgcccatgccgtcattagttcttgatcaatttctggtaagtcagattggtacaagtccaaccaactgatttcatcagctggattttgtttttgataaacttgcatgaactgcgccaaaatcgttaacgtccgtgactgttctgtagcaagtggatgcgccttaacaactaatactttactcattaatttccgccccttagtatttaaactttatacactatcgttttagtatactatctgcggcgttgtccataagctttacatcatttaataaaccaaccacctattaatgaccttttacaacgttttatacagcaacaaacaaccaaaaacgattaataagtcataaatataccgcaccatcgttcgactatcaattcgagtgctcacccaattgcccaacggaatcacaactaacaataatggtaagctaagtcccaatagttgcaatacttggatggtccaaaagcccgctagaatatgactgattacaacgattgtcccaacacaaataaaatgggcctgtagaatgccccttaacgatgctactggccatttttttaatgtcccataaatcaccaccggcacaccatgactattgtaggcactgcccatcatgcctgatattatcccagctaaataatcccaatgatgtgactgtaaatgttgctgctgcacgtgatgtcggtgtaactgatagcgattatagctgccataaaggattaaaaacccagctaacgttctcaacacaatcgtcgttggcacatacgtcatcaacgctatcccgactggcacacccaataatgaaccaatcactagtcgtctgacaaccgctatatcaatctgttggcggtggcgaatcacagccggaatcgccacaattagtcccagcgcgccaatcaaagccgttgccgcttttaaatcaatcgctattagggccaataatggcatcgttactaatgcctcgccaaacccaaaaaccgttctggtaaaagcgcccaacgcaacgatcaaaagaatcataattattgtcatccagaaatccttcctaaaccgttttgttccacacaaccttttcaaactgcgtgcctttactttttagtacggatagacttgcattagcaaccattttttgtgatcgaatttcctcaaacggaatccctagtagtgtgttgataacaaacaataaaataatcccatgcgcaacaactaatacatcaccatcaggatacgccgtttgagcagtcttaatcgcgagcatcccacgttctaagaccgcctggtaggactccgcgtgaatctgtttggcatcaaacagctctggatgatggaagtaattttcatattgtggatggttcgtcaaactagcaccaggttggccttcccaatcaccaagtgccatttcttttaaatcatccacgaccatgattgccggttgtgattgattagtctgcgacactatcgcatccattgtttcaacggcacgtgttaatggtgacgtcagtaacgcatcaaaagactggtccgctaataaactacctagtcgtttagcagccgcttgccccgcctcagttaatgttgaattcgtcccaccaccattgaaacactgtactcgattaaccatcgtttcaccatgccgtacaaaataaaaagttgtcatgttgatcccgcctttataggatctatcatactataaaatgcaaaaaaagacgcagttcaaattgaactgcgccttcattgagcctcgttttatttaccttccgacgtgttttctgccacgacttggtcataggcctttgtaccagcatagacttcgtcagttaggatgttgcgtttatacttcatgacacgataaatgtggagaattaagactgccacattaatgaccagtgctaaaccactgattgtcatcaaagcagcactactgtgcgtaccttgcactgaaaattgtgaatccgttacaaaagcgggataactcattgtaaacatcatccaaaaagccaatgtttgcgcacgtgcttggagccagctcccttttttaaccaggaatgctgctaatgtacatgaaattaataatgcagcgcccgcatagaatgagtgatcaccaacacaattgtaaacataggcgaagttccaaacatcataggcgataatccaaggccagatttgatcgggccagatcatgtctttttgtttgtcatgactgataataatgccgaaccagcctgagattgtgatgatgttaataattccggcaatcccgttcatgatattccacgcgccaccattcatgatcacaccgtcgactaagccatgtaggtgtgaaacttgaaaatcacgaatcacagcttccataatattaaacgctaaaattgcgggtgggaaaatcaatgcccacttgttgtgttgtaacttagggataaagcgcagcgccataaaccctaaacaacctgctaatgctgagtacactttaacccagtggaaccaagtcccggtactgctaccaggaccagccgtcgttggccaaacaaagagcgttaaaacgactggcaacccaacaaagagaattaatccaatccacttgttagcccgagctgcttcatttaaaaccattaatgcaataaccactagtccccaaactagccaatccattcctgaaatattttgaaataaaaacatatcagtcacctccaaagaaataattgctaattacattcttactttaactgcaagctggcggtttctgtatggtcaattcaggataaatgtccaaatctaatgattattttgtaaaacatggttcacagtaccatttaacatgcgatgcatgcgctgataaaattcctctttagattcttgtagatttgttacaagccattgcgtaatctgtgtcgccaatgcccaaccataaaaattggcaatttcatctcggaaagtcgctggacaatccacctttaaatcttgaacaacccctgcaaccatgctaaaagcgactcgatacaaaaagcgacttagcaaatctcgattaagtgaatgaaacgtatttaaacagaaatgccgattattttcaatataagttaccaagacatctagaccgacgccccaatcccgttcacgttgatacactgccagttgcgtaacaatttcacgattataaatccaagcaaccaactcattaatatcggcgaaatggtaataaaacgtattgcgcgcaacgtcagcactgcttgtcaattgattgaccgtaatgtgatcgaccggagttgttttcatcaattcttttaaggtatctgctagcttttgcttggtatccatcgtattgccctccaaaaattatctatgattagcatcccatagatagttccgaactgcaatcactaaccggatttgcactccaggataaattgttctatcgttagagagtacaattaacggaggcgacttataatatgcacgaaactgacgacgcttttagggcgatgaccaacggggaatggtactttgattcagcggtcactattcaaaaacgggatgcagcccgccttgccttacaaaaggccagccaaatcttagataacgatgcacggatggccactatccaaaaattactcggtcataccggtagcgattttttcatcgaaaccggttttgaatttagcttcggtgaaaacattacgattggcgatcatttttacgccaatcgtaacgtcgttatttgtgacgaagcaccagtcaccattggtgactactgtaaatttggcccaggagtatcactcttaaccccttaccacccaattgaccccttagaacgtgcgacaaaaaaagaaatttctagtcccattactatcggcaatcacgtctggctcggtgcaaatgtcacaattctgccaggaatcacgctcggcaataacgttgtcgttggtgccggcagtgtcgtgaccaaatcctatccgggtaacgtaattttagttggtaatccagcacgggtattacggaaaattcccgctaaataatcaaaaaggactgacaaatgtcagtccttttttaggcttcaattgcataatattcaataatcgtttgtaaagcctccgctacgcgttgatctccaattaacttagtgtagtatgctgtaaatcgttcatctgctacatacatggctgctaaaccgcggtgcattgctagactataccggggagtcgctgtttgtaaccacgtttgatgggcttcaaaggctgtttgcgccgcttctgatggcaattgcggctggtccaagtaagtttgtaatgccgtcttcaatcggtcttcagccgcctgcatcgttgcatattgggcctcacttagccctaaaaagtgctgatcggcttcttgcttggcttgtttcccatagttagtcgtcacttcttgcccgtagcgttgctcattttcagccactgcctgttgtttaaactgtttgaatttagtttgatctgtcatttgaattcctccggtttgattttgaagggtcgcatctagctgtgctaacgttgccgttagcgcagcttgttgtttaaccagttgttcccgctgatttgctaagcgttccagacgctcggccggtggtaacgccaacagctgctgaatctcagccagactaaactgtagttgacggtacattaagattaactgcagtcgatctgcatcctggctcgaatacgttcgataaccattactagcaaccgttggcaccagtaaaccgcgctcgtgataataacgtagcgtacgctcagaaaccccggtcaattcagcgaaagttttaatctgataatccatttgccttccctccttcaaaacccactataaggcctgacgtgacgtgaaggtcaagcattgttcgttagtgcctgattaatttctgtttaaccaagtaatcatgggccacatcgcgtgctttgcggtgtttgacctgtacttggtagttcatctcttgcatttggctctcagtaatctgacctgccaagcgattcaatgctttgacgacttccggatgcgccttggcaaagccggctttcataatcggtgccccttgataaggcgggaagaagtgacgatcatcttctaaaacaactagtttgtaccgtgcgacttccgcatcggttgtataaccatcgaccacatcgaccttgccgtccgcaatcgctttatagcgaatacttggctccataattttagcatttaaatttaattgataggtgtcctttaacccttgatacccatctttttggtgataaaaatcaggatcaaaaccggccgtaaatggttgattcaaagcggctaaatccgaaattgttttgacattatatttcttggcaaaggccgcagtaaccgccaagtcataaccgttttgatagcgcattggcggtaagtacgccatattgaactgttcttgtagcgatgtttttgcaagttgatacgttttagttggattctggtttgtcttagttggcgacttcaccaacgtctgtaaaaccgttcctgtgaattcaggataaatatcaatcttatcagccttcaaggcgttaaataagaatgtggtcccaccgaaattaggtttaaccgttactttgtagttaggctggtcttctaaaattagatcacgatacatattcatcaagatttcgggttcactacccaatttcccagcaatcgtgatggtggtctgcggcgcttgaaaccgtgtcattccttcgatcacaccgaaaaggccaacaaaaatggctaaactgactgtgatttttttaaaggataatgtccctaaccagcgaattaatgcactgaccactaacgctaaaaccgctgaaagtgtcgccccaaccaataatagtgcgttattatttgactgaatcccaacaagaataaacgtcccgaggccgcccgcaccaatcaaggccgccaaggtagctgtcccgataatcatcacgagtgcaatccgcaaacccgagataatcaacggcatcgcaagtggcagttcaatccgtagtagccgtttagcgcgcggcaacccgaaggctatttctgcctcttttaatgctggatcaattccgatcaaaccagtgtatgtattttgaaaaatcggcattaaggcataaagtactaacgtaatcacagccggaatcgtcccaattccgacaagcgggatcaataatcctaagagcgccaaagacggaattgtctgtaagacactcgtgacttgcagcattgcttcagctaatttctgatgagctgttaaaacaatcgccaacggaatcccgatagccgccgcaattaataacgccaataacgaaatctccaaatgttgcccaagtgcttgtagcaactcaccggattgggtcgttaaaatttgttcaatctgttgcatcatcgtcataccccccgtttcgcaatgagcgttgttaaatcggtcatcgtcaattgccgttgttcttgaccatcagtggcaactacgcccccatctggatggtctactaattgttgcgctaattcagctaatgttgcactggacgtaatcgttgtcggctgattattaacaacagttcctaaatcggccgccaataaatcttgaactgtcaacgttgcttgttggcgttcaatgtcaaaaaattcgcggacaaattcattttttggttgattaaaaatcgcttttgctgtcccgacttgctgaatactgccttggcgcattaccgcaatttcatcgcccaagcgcaacgcttctttcatatcgtgggtcacaaatacaattgtattatgcagctgcttttgtaaactcaaaacgagatcttgtaattgtgtacgggtcaccggatcaagcgcactaaagggttcatccatcaaaatcaccttaggactagttgctaacgcacgaataatcccaatccgctgctgctgtccccctgataattcgcttggataacggctagcatactgatccggatctaaatggaccatttccaaaagttcgcgtgcccgtttttgacgatcagctttggtccatttcaatacctctaattgaatggtaatattttcctcaattgtgagatgtggaaacaacgcaatgttttgtagaacgtaaccaatattgagccgtaacgtttggagatccatttgattgatgggttggccgtcaatcttaattgtgccactcgttggttcaattaaccgattaatcattttaaccgttgttgtctttccgctaccactcggtccgaccaaaacaaatagaccattgtctggaatggttaacgtcaagccatctaatgctaagctttgttcatattgcttagtgacaccttcaaattcaatcatgtgctactcctttttccggttaacgatttgttaacttattgtaccacttagcaatcagcccaccaattgacgtgcttaaacacccaatccaatttttttgattcgctttgtgactatgctaagatgaacccgaattgaaatctgaggaggtcttaatatgcaaacacactttgatacaatcattattggtggcggtcctggcggcttagcggcggcttacagtctcgctgaacaacagtccgtcttagtcgttgaaaatgatttatggggcggcacttgccccaaccgtggctgtgatcctaaaaaaatgctttattcagctgtcgaagcactcgacaatcaacaagcgctccaaacaaatggcttagtcggaactagcgctattaactggtctgaactgatggcctttaagcgatcttatacgcaacaaatcccaactggtaccctcaacggtctacaacatgccggcatccaaaccgtcacgggcaccgcccacttcagtgatactcaaaccttgcagattaatggtgacacttacactgccgaccatttcatcattgcgaccggtcaaacaccaacgctccctacaatcgagggtcacgatttactacaaaccagtaatgaatttttagacctcgatcgtttaccagaaaaggttgcctttattggtggcgggtatatcgccattgaactggcaaatattgcagttactgctggtgcagaagtccatattattcaacataacgagcgtattttacgcgacttccctgaagttttaacacataaactcgtcaccagtcttcaggaaaaaggcattcactttcattttgacactgacgtcacaacaattacgcaaaccagcaatcagctaactctcagtaatcaagctaattttaaactgacagtcgacgccgcttttgccgcaatgggccgcaaacccaatatcgaccaactggcattggaaaaagctggggtaacagcgaaccagcatggcattcaagtcaatgaccatttaatgagtagtaatccccgcgtcttcgccattggtgacgtcgtagatcgtgtccaacccaaattaacaccagttgctggttttgaaggccgctatgtcgccaaccaactactcgctaaaaagacagcacccattacttacccactcattccacatacggtatatgcaagcccacaaatatcacaagtaggcgtttctgttgcaactgcacaagctgctcctagtcaataccgcattaatcaacaaaccgtcacaaattggtataccttcaatcgtattcaagaatccgacgcaatggtcatcaccatttttgacaatcaaactaaccaactcgtcggtgctgcggcttacaccacaattgctgaagaactcattaattactttaccaacctgattaaacatcagacaaccgcaacggaactcaccgataccatctataactacccaagcccggcgagtgatttaaaatattattattaaaaaaagtgttgagggccaacttactcacgaccttcaacactttttttaattttcttttttcgccttcatctgtaaccagatattaaacgcgagcacaatcaccaataggactgtcgcaatcagcatgatgttatgcaagccttggtacataatcgcgcgcatcgctggtaataagtgcgctggtaattcgtgaacgcgttggagattgcttaacttattcatcatcgccatcgtaatttgaccgtgcgattcggcaatgccgcgtgttaaggcatggtttaaaatcacaccgtaaatcgatgacatgaatgtttgactgagaattcgcaagagataggcaaacgacgtcgcaatgggaacatcacgttcttcggcatcttcttgaacactgatttgtaggacgttaaaactcatcccgagcccgaaaccttcaaaggcccccatcaacagtaagaaccaaaacgatgcttggtcgcccatcatcaacataccgctaaacgcaattaaaaacgcaactgttcccaatgtcacaacgcggtgtttacccaatttaggctgaattgcgggacccgccaatgagccaattaagttggtcaccgcacctggaatctgcgtcattccaccgagtagcgcacttaatccaagtaaaccttgcgcccacattggaatatagatattaaacgcgataaatgcgccccataaaacaacaaataaaataaagtcggtcaccaattgcggatttttaaataagcggttcggcacaatcggatcaactgcccggtcttcaactctaaacaagacaactaataaagctaaaccagcaaataccaatcctaaaacgagtgctagcgaacccgtcccaatcatttgaatccccgtcaataaagtcaccaaactggtaatcataatcccagcacctaaataatcgacgtttccggtttgatgtgatttaagcgtttctttaaagaaataacgaacacaaacaattgatactagggcaattggtacattgatataaaagacccaatgccaactaaacgtatcgacaatccagccaccaattaggggtcctacaattgaagccgcactataactcgcagtcgcataaccaatcacctgcgcgcgtttgcgtaaatttttgtataagtcggcatagataatgaatggtaaagtattcatcccgccagcaccgatgcccatcaccgttcgtgcaatcagaaagaagacgatattccccgaaaccgcctgaaaaatcgaaccaaccgcaaataataatgtcgccagctggtaagccccacgatttccaatccgttcgcctaatttactccataagggggtcgcaaccgccatccccaaaaggaaaaccgccacaatccagcccatatattgaatcccgtgtaaatcactgataatagcgggcaaagccgtgttgataattgtcccatcgagtcccgccattgtgttggataataataatgctaatgttaccaaaagtgtatttttcttactcacgattgcgtgccccatgtatttttcttttatatttattatagtataagttatttcgtttaacgagcttacttcagtatatcaatcacttttaatatcataccttatcatatacattttcatacaaataaaaaagacgtcctcctcaggacgtcttctaactttaatttaatgcgtcaaactgttcgactttttggcgagctttatcactccgccgcatccggataccatattccgttaaaccaatcacaacagcgactatcaagagaatcaataaactcttccaatcttgcttcaaaataagcaaatcgcccgcaaaggcgtagataaacgcgacaatcgttgaacccccaaagcacgccaggccctgtgctcggggggtgaggtgggtgtctccagccgccaagttgacaaaggccgtaggaatcatcggcactgcatagccaattaatacaccaagcgctggatgttgcatcttaattaatgcgcggtaaacacgcgaatccggctttttactgcgatgatttctgacacgggcaaataattggacttgcaacaagttcccgatcgtcaagccaatcgcattgaccacgaaaccaccccaatgacccaaacacgcgccaataatcaatgccaccgctgatgttggcgcacccggaattaaggtgaccccaatcattaacagaccaaacaccaagaaagcatacggccccagatgacgaatctcaagcacatattggcggtaattttgccattgatccaagaaagcaaaaacggcggtctggtgttgccatccaattagaagaatcactaatcctagtaaaatcacaccgcttgctagccaaagtcgtttccgttgtctcttcgtcatctgattcccctcatttctacttaacaaatagtcctagttcctctagtataaacaacctgcaaaggggacaacaagtttattttctattttgattcaattcgttcactaagcgcttattttgatagcgcgtgtagtaataaaaaataatcacgtgcattacgaatgttaataacgacgtccctaataaatacggtgaaacaacatcaaataacgttgtcgaatagagcctcaaagcgagtatttgaaacccaatattactaatagtactaatcaaaacattccacggcgcaccgaacgtcgaatagcgccataagtatgaataaatgacgccaaacacaatgccaatcaacacgcctaggctaactaatcgccaagcagccagcgcttcgccccgcgttagcgttgtgacaacagtgagccacataatcgccattaatgccacttgattaaagtctttgcggatttgcttcatcattttaaccactcctttatttgcttggcataataccgactaacaatatactgtcttccagattgcgtatagaccaccaatcgcgcatttgaacccaccgcaaaattggcaacttgctgcagatttaaaatcgttgtgttattaattctcagaaaaccgttctgcgaaaacggggctaattattttaaattactagggtagtaatagctattgccatcgattgtcgccaccttcgccaaatgtccaaaggccgtaaaactttcaattgccgttaatgatatgttttgtaatcgatctgttcgcgcatctcgcacctgaatcgattgatcaaaggttagcttcttaaaagcagattcaaccgttgcttgattctgtggttgactgtgaacgacaatcgtatcttgtgcacactttgaatcccaattaaatataattttcattaactcgcctcctctacaaacctaaagatagcagaagatctcgcttaattcgatgactatttgttttgttgcaagctgctctctcttgttgcatataaaaagcctcattcaacaatgaggccttttatgcctatctctatttgtgatacggacttccttgattaatcataaacgcccggtaaatctgttctgtcaatactaagcgcatcaattggtggggtagtgtgagcttgccaaatgaaagtgcatcattggcgcgtttgttaaccgcatcgctagtcccgagtgacccgccgatgacaaatgtgatatctgatttaccataggtcgccaaatcttgaatttcctttgcgaattcttctgaggcacgttgtttgccttgaatcgccaggacaatcacatgttccttatctttaatcttgttgagaattcgttcgccttctttgtctttgacgttagtcatttcagcgtcacttaatgattcgggcgctttttcatccgcgacttcaatcatttcgaacttacagaacttactgagccgtttcgcatattccgcgatccccgcttttaaatacttttcctttaatttaccaactgtgattactttaatgttcataaatagcctcctactgttacttacattttaggggaaaacaatgcagaaaaaaagctattcacagtaattcaccggaaagtactgcttatccacaaaagttgtccacatatgcacaagtgttcgtcccaaatatggtatctcgaatttttcttgatactaaataaccgacacctaaattttttcgttaaatttaataaaaaagttatccacccttttttgattgttcgttctcaaattatccggttacaaatccttttatatcagcgttattctggtgttataataattttaaaaaagttatccaccgcctgttaatttttttgtggataactaaaaagaccttttaaccgtgttatacccacaatccacagacttatccacagacgctcggatttcttcccaggttactatccacattgacatttttaaaacttaacattcctgccactttagtctgaatttaaccaaaataaaaaagccgtcaacatctaattgatgctggcggctttaatttattttgctgccgttgtactatctgttgatgctgcttcagtcaacttcactgttgatttcttcaattcaccattatgataatactgaatttcaaccgtactattcatatcgtaactgtaaagtgtcgtgtgtaaatcagcaacacttgtgacatccttgccacctaaaccaacaatgacgtcgtatttactaatccctgccttcttagcaactgagttggcattgactgatgcaacaactaccccactcttcacagaggttggtaatttcaagactgatgattgttgcgttgatgaaacattcgtcaaatcgatgacgctaatcccaagcgctggtcgaacaactttcccatttgtaaccaattggttaataattttgaccacttcgttacttggaatggcaaagcccatcccttcaaccgttgtgctcccgttagaagctaacttcattgaattgatcccgatgacttgtcctgcaaggttaactagcggaccacctgaattcccagggttaatcgctgtatcagtttgaataacggttgcttggccagtcgcttgaccggttgtttcatccgtcacatcaatcgtccgtttctttgctgaaataatcccttgggtaacagaagtagcatattctgagcctaaaggcgaaccaatcgcgagcactgattcaccaggtttaatgctgtcagaatcaccaaacgttgcggtcttcgtcactttggcactatcaatctttaaaacggctaaatcagaaacggcatccgttccgactaagctagcatcaatttttgtgccatcactaaggatgacttccaacttatctgagccagaaacaacgtgattgttcgtgacaatgtaggctttaccatctttcttttcgtagattaaacctgagccttcactcgattcttcaagctcactactactactttttttattggtactatccgcgccaaagagcgcactcaaatcgcctgaattatcttgttgtttttgcaagttaacaactgacacaaccgctttgttgaccttattaaaggcagttgttgtttgtgaagatgagttgactttgatattactaattttagtggcacctgctttagttggtacttgggcagtgcttgagacagtgttacttcccatctttgaaccggcataaccagcaacgccaccaccgattagtgctgcaataacggcaacaacagccgttttcattaatcctgaattctgattcatactaattcacccaaactttctaataaattctgtttattgattatctctatcatagaatgtaaatttgaaaaaattatgaacaagttacgaatattaaattgtttttctaatccgcattttagcgaacttatttcgcaaaaacaactaaaatgtcttctattcagtctaattacacggcaaacaatggatcagcaactgccggatcagtatctagaatttcaaagtctgttcccaccccataatcatgttcctttaagatcgacgcaaccgtcaaatgggccagttccttcatgttattttcttgactcaagtggcctaggaaaacgcgtttagtctggttccccataaacgacatcaaagcggatgccccatcttcattcgataaatggccggtatcactgagaatccgttgtttcaatgaccaaggatactttcccatccgaagcatctctaaatcgtggttgcattccactaaataagcatccgcattttcaattgtcccacgcacttgatcagagacataacccgtatcggtcaggattgcaaaggcacggttattatgatggaattggtagaattgggcagcagccgcatcatgtgacaccccataactttcaatatctaaatcaccaactgacaaggtactacccatttcaaaaatgtgcttgtgttcagcaggcacttcaccaataatcgaagccatcgcatcccatgttggttgatttgcgtacacgtctattccgtatcgccgggccaaaacaccgacaccactactatgatcgcgatgctcatgggtcactaataaactgtccacatctttaagatcgcggccaatactatgcattaaatcttgcacacgtttcccactcattcctgcatcgactaacactttatgattaggtgtttcaatatacgttgtgttgccagaactactgcttgcgagcacgctgacttgcattgcgtctttttctaccatgttttgctctatccccttggtctctttctaaaacaactaaatttcactacggttcttcatcagcgcaccggtaaaggcgttaatccgcttaacgacgacactcttagaattcttattctcaatggccacttgccaagctggcacgtacaccgtactactattggcgtccaacaaagcactgtatccgagtttcacccacataatgcgtgagttattcggaatctcattatctgtatataaatcaatgaccgcgtcttgagcagtcaccttcgtactttctttttcacgcaaaacttgaatcttattcgtgtaagtttgcgtgtaatgactaatctgcccgtcttctaatgtaaaaatcaactgaccatgttcatccatgatctgcccgcctgggactttttgcacatatacgacttgttgatcactcgataatgcgtgtgaatagcggtagtcctccgcttgaatcacgttgtctggttccttcataaaggccgccacggctaagcgttggttcccttttttgtaagtcagtggtttatccaattcactcgtcagtgtcatgcgcgctttatcaaacgaaacagtttgaccggttagtttggcactcgccgtttctaataatgtctgatctttttgtcggctggctaaataataaccatccgttcggcgcttggagagtttcttcactgaaatttgatcgtcttttaaatccttcataatctggctagtctgtgaaccactagtaatcgccgtcgacgttattgtctgactgcctttcagcgaggcaaataaatagatatccagcgcaataaaaatggcgataaaaatcatttcaattctgcgaaaatccattcatctaactcccttcggttaattcagctttttgcgccatcaatgcggataagctacgccaaacccctttatactgtacaaagtaggttggatttaaatcaatcacttgttcgttactggtttctttggtccattcataaccgacttgcacgttttccacattttctagcaagaaaccattacttgtcaattgattcaaaacagactcggtacttggcaatgtgacttgcttgtcttcagcaggaacgggtacttgcaaactataatttgaaaaatcaatcttttggccagttggtaagaattgtactttcacgctcccaaagttagtctgataaaagactgggaatccttcaacgtaggtccgataagcagtcgaattcgttgctttatcataactatagaaacgcatccctgaaagggcgttacctgtctttgaaagcgcatcaaaactggcttcaaaactctttgttaatgtgcttggtgatttctcattttcatacttcacaaacgaaatttcaccggtatcatggttgatcgttaggcgtttatacaaattgctgtccgtcccatccgtataaatcgcactattgccttgttctttcgtatcaatattatccgtattttgttgattcaacagcgttgtgatgtaataattttcgggttgttgattaactaaataactataaggcaacaacgtttgatccgctgccacatagagtaatggcttgtgattcaacattttttcggtcactttcaaatgcacatcggcatttttaagcacctttttcacacgagcttgtgaaaaaacattgagtgtcgtttggtacacttgatgactttgatcattcatcaaccacaacttaggctgtgtgcccaacgtgattcgaatccgattgaatgtcacgttttgacctaaattattattctgataactgaagacctttttaaaaatagcgtacgaaatattatcaggatataaaagggtcaatgtatgatcctcactaattgcctggtaataatcgtcttcgcttagcttaacttgcttaaactgtgccgacttggcaagctttaaagtcgctttaaactgtggaatcaaactctcttttgagttataaatcaactgactctgattgtctgtccgccacaatagttgcgtcggcaagaagatatcaccgatttttcgttctgtcttacgacttgttgacttagtggtggtttgactgtccgtttggcgctcataatgcgcgttactggtccagattagccatgatagcccgatactgacgataatggcagcaatcagtataacgcgcattaaaaagttattaaatcgcatcccactcacctccatcagaatcaattggttcatatggcaacgaaatgtagaatgtcgagcctttaccttcttggctatcaacccaaacacgcccacgatgcgcttcgatcacttctttagaaattgccaagcctaaaccagtcccgccttgtttacgagaacgggccttatcaacccggtagaagcgatcaaagatcttaccaaggtctttccgtggaatccctaatccttgatcagagatgcttaaaatcacgtgacgatgtgtttccaataagcgacacgtaatcacgccaccatctggtgaatatttaatcgcattattcatgatattatcgatcacctgcataaatttatcggtatcaatttcaacccataaatcccgcttagtgaagtctcgtgtaatactgtacttcttattcggatcatctgttggcaatttgcccgtgctggttgtcagtttaggcaaatcatctttgtgctcttgatcccgcttgatcatcatatcaaaccgatccagtgcatacccaaagaactcgtttaaattaacatattcgagattcatctttgccgttccttgatccattcgtgacaaactcaatagatcgttgatcattcgaatcatccgatcagtttcttcttgggtcacctttaagaaattgggcgctagctctggatcttgccatgcgccatcattcagcgcttcaatatagctccgcacgcttgttaatggcgtccgcaattcgtgagacacattcgaaacgaattcgcgctgttcttgttcattcttttgttgttcggtgacgtcgtggagcacacaaactaaaccggtgatatagccggtttctttttgaattaatgaaaaatcaacatgcaagattaagtcgtgatcttgttgttctgagaaatccaagaccatttcctgttgcgtttctaatagatcgcgcaaagaatattcatcactgattcgtaaaactttaagcaatgactggcccagtaactcatcgcgtgtcacatttaaaaaatcttggccagtttcattgataatcgtgatattgcctcgtcgatcagtcgcaatgaccccatcagtcatatgactgagcacactatcaagtcgccgtcgttccgactctgacgcttcttgcgcctcttcaacccggactgataagttattgaccgcaatcgcgagttgccccagttcatcttgaccataaatcttaacttgcccagagtaatccccacgcgccatttgaatcgcttgtttcttcatttcatcaattggtcgggtaattgcccgggaaataacaatcgataatgccatccctaataaaccagcgactaaagacgaggttaagaaaatgacggtaatcgacgaaatccccttgtaaacatcttccatactagcccgaatataaacggcgcccacaacggtattactatccccacttgggttcgtcaacggttggatcgctgtataatagctccctagactctcattgtatgccacttcttgttcggtatgcccagagtaaataacctgtttcacccgtgggttacgcgtcttttgaccaacggtactttgattattcaagttcgtgacacctcgaatggtgcccttattatcgacaacttgaatttcggcagaattgcccatatcgccaataatctctttaatattcttgttcgcattaccactattattcagtaactcattactaagttggttttgaatataggatgtcacttgtaaggattgcttaaaatcacgcacattctgatattccagttgcttcacaaaagaagcgccgataacttccaacgttaccagcagcaacaatacgaacacaatggcaattttaaaatgaatcgattgtagcaaccgaattttcttattcatgcggcaaatttactcctgctcaggatttcttaagtagtaaccaacaccccggcgtgtcactaaccattctgggtggctggggttgtcttcaattttttcacgtaaacggcggaccgtcacatcgactgtccggacatcaccgaagtaatcatatccccaaaccgtttgtaacaagtgttcacgggtcatcacttggccgatatgcttggctaaataatgtaacaattcaaattcacgatgcgttaattcaatcttgtcgccccgttttgacacaatataagcatcaggatggatcgttaaatccccgatgttaatctcgtgattttcttcattcgcttctttatctgattgactcgttgtaccttgccggcgtaggttagccttaactcgcgccactaattctcgatttgagaatggtttcgtcacataatcatcggcaccgagttcgaggccaatcactttatcgatttcagaatctttagccgtcaccataataattggcatatcatgcgatttacgcacttggcgggctacttctagcccatcaatcttcggtaacatcagatctaatagaattaaatctgggacagcctcttcaacttgttgtaaggcttcttcaccatcataagccgtgtagacttcgtaaccctctttggttagattaaatttaacaatgtcagagatcggtttttcatcatcaacgactagtatttttttagccatgtgcggatcctccttgaatgtggatgctttgccttctattatactcattttcagaaggcaattcaaaattaggtcaattcctaccaactggattaacggcattgttaatccctataacgattaattcttacgcgctcagtaactttattcaaaaaaaatacaaataactgtttacaaaagtttgtttaatatgctatgatatttaagtcgtaaggcgagacatcatatgggtggttagctcagctggcagagcaacggactcttaatccgtgggtccagggttcgatcccctgaccacccatcaagtatacatgataagtcgttatagaggtgcttaggcattgatatgacggcttttttatttcttcttagcagattagtattcacagtgaatacgacaaaccgtattcaaaaccgtattcacgtattcaacaaaaatcacgcacggggcatatacataacttactgcaggcggtcagattagtggccgttttttaatttggactaacttcattagccaacgatttaagttaaacatagactgttaaaaacatactagcaaccattagcattcatttttattaaatttatggtttccgtcgtaaatcgcgactgtattcattagataagggggtgcctccagttttggacagacgtttcaaacgggcccaagtttagcttggttgtatttttcgacctagataatatctaggggtaacgtttcgttactccatatgtttctatatcaaaacacatctgctcaagcttgagccaatttatatctaattgagtagcacggaattttccgctgtactcattttattttgacctaatagaacgatctgttatggcaggttatttcacggttcgacaaaccgccctattttagggcctcctttttctaaactaccgtttcggtacctcagattgcttccatgcaattagccgaaaccaaagatggattgggcaacatctcgttaaaatcaacggtatctaaagttaattagggccgaattttcggccgtactgtttctataattggctaagtatctgacgcaccatatcagtgcattagatgctgttgtaatatactaactcatctttaaggagtcatcaattcggtgactccttctttagggcctctaaaatctctaaataaattaatgttaggttttgttaggttttatgtccaacaaaagctaattcacgtaggtttacattggataaaccaataatggcttgtcctattcaattactaatccataaactagcctgcgaaattttgcgcaacctacttataaacaagcaactcttgattattatagctttcggcaaaagctaataacgccctattcttaaaccgattataactagacctgctataccccatcgtatccgctatatattgccttgttttatgactaccgtctaagtaacacatattaataatggatgcttgcgtatcctccattcctcctacaaccgcttgaatacactttaaatcacacttagcctgctcatgtaagggatgactagtatttaccgtggctagccgtctaatcgtgccatagctctttaacagctttctggcgtttttgatacttgcttgttggtttattcggtcaatgatcatactgcttcactccttaagtattaattcaattttgatggcatcctaaatcaggactgcatccccgttatcaatgcttcttgaatattaataagccttcactagggtaggactcggcaaactctagcaaagcctgcttcttatgcttcttgaatgatgatgctgttatacctagttcaccgcagatataagccatggttaatttaccagcacttaaatactgcatctttagcaattccctgttaattaccgttaacttacttaaagccacgtctatgtattctagggtctgccgtgcctcgagtgttttaaccgcccgtttctcggttgtattatcactgctaaaagactttggcgcatgatcacaaataggactctttaaatgactggcactacctgcaatatgtttcactcgccaatatcgctttaataatctatctgcttgctgtctgctcttatcctcatcaatatcaaaaagaaacactctgacacctccaacatattaaaaagggatgcactattgccatgtactagcagtaacgcatccctttggttttccaatcaggtattaaactaatttagtcttgtctgttcgttcaatgaacaccaccttattattttgagttgtaacagttaagctcccataacttggtaactgatattctttgctttgctgttgatccgtaataataattttgaccatcatatcacctctaaatatcaatcccaaattcttcagttagttgatgatgtttagcgaattccttgccacggtcgggcgtaatcgtacccaagtgttctggtggcagatcttttagtagtcttcgaatagtagtggtcacactggctgagtttttcttagctgctttgtgcattattaagtatcttgaacaacggtcaaccattgtgaccacacaagatctgccagttttgccagctacagtatccagctcccagtggccaatctgagtccgcttattggcagactcaggtcgttcttggagtgtatgcgatataggaatcttcccgcgacgttcctcataaccttttttatggcgcgatttaccatgatgtctaagctttctgatcacccctctggcacctcgtgatgaaagcttctgatcaaataaaccggagtagatgccacgataaatcgtggtgtagctgatctgaaatgatgaggtctctaattttaagcgtgcggcaatttcttctggtgaccattgtagatccaagaataaatgccggattaattgaagcaattggtgatcagaaagtagcgaccggcgtccacaatgagatttttgagcttcgtagcgctcttgagcaacagaaggtgaatatgccgatctattttcgcgataactcacggctaactgtcgccgttgctcgaccaattgtttgggcaattgaagtcagtgaagcctgattattatgcatcaggaatatcgtttcgcgttcactcatggtaagatgtttgtatgggctcatgattatgtgctcccttcgatggttgtcttcgcaaacaccattttacagggattcatatcatgagtctcttttgttgcacttaaagtataaattcaaggcaataaaaaacgttcaccgcaagtgaacgtttttttgacttacctatttagtttgtgaaacggtgttgcgggcgctaacacgtttgaagacgtggacggcaacccctaaaacggtaccgactaaggcagggactaaccaagctaagccgtagttggcgaatggcaagtatgcctgttcgaagccagtcatcgctttaccgaagctactttggctgacgaccgctggaaaagcagttaccatgtcgaaaaaagcaggaacaacggtaaagagaacaacgaatttatacacgactgggtctttgtggaacagtggtgaagcgactgacaataaaatcaagaccattgatagtgggtataagaacatcaacattggcgttgaccaagcgatgatttgatttaaaccgatattagcggtcaagaatgatgccagagtagttagaactaaccaagtgcggtagctaactttgggaaaatgtttatgaaagtcttgggcaaaagccgcaactaaaccgatcgccgtggttaagcaagtgacggtgatcaaagtggctaagatggcctgaccagcgacgcccatataatgattgacaatttggtcaaaagcgatgccgccattagcggaaactttgagtttacctaaggacatcgcgccaacgaagatcaaaccaacgtagatgacggcgatcattgccattgcgaagacgccggcacgggcagtgaccagcgcgacactgttagcgcgttttttgcctaaggtgcgaacggcggtaactacggtgaccccgaaggctaagccagctaaggcgtccatcgtgttataaccttgcaagaaaccattgacgaaagagcctgatgtataagcagcggtggcgtgttgaacaccggcgtggcccattggtgaactaaaagctaagaagaaaacgccagctaataagactaagaaaactggatttaataacttaccgatattgttgacgattttattttcctctaatgagaaaaagagggctaagccgaagaaaacagcggagaaaactaataaaccaactgtttggaaattctttggtactagtggcgctaagccaaccgtgtaggaaacggtggctgtccgtggtgtaccaaaaagtgggccgatggtgccgtggatcaagatcatgaataagagcgcgaatacgggacctaaaggccgcccaacatcatagacaccttcggaacgagtgatactgattgctaaaacggataataatggcaataacacaccagtgactaagaagccaagcgcggcaggcacccaattctgtcccgctagctggcctaaatgtaatggaaaaatcaagttaccagcaccaaagaatagaccaaaaagcattgaactaaccacgaaataatcgcgtttagtgagtttacgttcctctaacataagcagcactccttaaattttgtaggttgtggaaatgtggttcaaagactaagcgtctgttgccccacgtttaaatcatgagtgttgccattgctaagtcgactttagtaatggcggcgatcatcctgcgcgggaatgatcacgataaacaaaaaacgcccaaacctgaaaaattactttcagataaggacgttaataaacgtgttaccaccttgatttgccattttctcacgaaaacagcctcttcgggtacaagcaccaattggtacgaaataccctagctcgataatgggagcccccaatgaacgctcaaagatgattttctaattgtcgcaccttgacgtccttgcaccaaacgacgctcgcttaactggtgaatacaattatacttttcttatcacagcgtttaattttctcattgatttataatgtttctataatttaacgcgattttaagtgtttgtcaagggggtgataaaaataaatttataatttaaggcagtagtccatattgaattaacgtgtcaatgctatctaatacgatggtcgtattatcaaaatgtggctgccattttaggatatcttgcgctttttgggtactcaactgacgattgacgtgcactaataaattgccttcgcgggcggtctggttgaacaaagcagcgctgcttaaaagcaagttcggcatcgttttagtgggaatgttttgggcaatttgcggtcgtttttggcgaatcagtgctgctatctctggtagtgatatctgaccagcagcactagccagaaaacgttgcccgccagcgtgaggtgcggtcagcgcacgaatgtgtaagtcagcaacatcgcgcacatcgatcagattgagtgggatattgggaatcattttgggacgaccgttaagtaaatttttcaatagatcgaagctgccagaaacgtgggcgtctaatgctgggcccatgatcgccaccggattgatcgtagtcagttctaaactgccgtgactttgttcaataaactgccaggcagcctgttcggcgatcagtttgaatttttcataggccgataagcctttttcgttaggatcagtccaatcggcttcagtggtgatgctcgtttggtcgtgattactgaagccgatggcgccaaagttggcggtcatgacaacacgcttgacgtgggcctgttgggcggcctttaaaatgcgtaaaataccctcggtggcagttgtgtcgctgttcgggtcattggaaaaaacgggtgatgctacacttagcacgtagtcgatgttctgcatggctgtcgcccagccagcatcttgagtgagatcagcggcgacaaaacttaaattttcgcggtgttgcgcctgattttcttttagggcggtgcggacggtggtttgtttgtcgagttggcgtaaggtggcacggacgtgataaccttgatttaaaagttgtaagataatgtgcagacccagataaccgttgccgccggtaactaatacgttttttgtcatgatgttatgctcctattccctaatgagggttaatttaatcagtcatgtatgctatgccgttaagtagcatgatccttgtttatggcttctttttgtttataatagtccctagagtatactctagggcaagcaaaagaacactatttcaacgcagcgatttttaccgtagttgaatgatccgccgcgatgtacccaagggtttatccatggatattttgggtcctcatgatatccaagcagttgagtcaaagctaaacaatttaccgcgccggcaaactggctatcaaacacccaaagagcttttctccgctgcttccgccggttaagttaagtccataaaatatgaatattaatgaaaatactgatttaataggatttatcgtgtggctaatctgttcttgcaatttgggagtaaaattaatcattggtgctaaccactcctttacttagaacctaggttttatcaggttattaaccaaccccctatatattagggggccaagcgttcatatagcacgctcaacgcacatctcttttttttacataaaattccctaaatcggaaattcttatccaagttgataggcccgcgaaatgctacgttcggatatattaaacgtccaatttatttctttttcgttcttaatctgataaccagcgattaacatcgcgcctttcattgcaccatttaatacataaaagccaagtggtgtacgttcaaaaatatgtttaatctcgtatgatgaccgctgactgctaaaagttttaattggtttcaaggttgttagcacccaattaacgagtaccacttgttcatccgctgataattcattgaataatttaggcgcgttagtttcttcaaatttatctccaaccactcttagtaggtggcctcattccaatgattttcaaataaaaacgtcatccaatagatgacgtttttatgtttatgcgtatagagccttttgattatatttaacatattgtttaccaaagctaacaaccattcctgatatcttcttagcgactggataaagcacaagcccaataatgaataatgccagacatgaaatcaattggaataccataaagcacactaagtgtttttaaaacatgaacgtttggtaatgttttatcttgctcccatctagaaaccgtttgacgtgtaacaaacaaattctgtgcaacttgttcctgcgtcaccccaacattcatcctagcttcctttaaagcattcccaactgacattttgccacctccgctataaacctaatttaacgaattaacccccacaaaaacaagcaacaaatctgttgcatccctgctattaaagcatttcaactcactggcagtcttttatttcccgggttaattcccgaaaacagctaacattttctttgttgccttttgggtcttcacgagttcaccttgaatacaccatctgcggaccgttttatcacaggtaatcagtgtcaccattttacgacctggtacatcatcgatgacttttacgtcgtatggactgattgaagctttgtaatcaactttgtacgtgtagactttttccatatccgttaagtagaccttatcgctgacgcgcacattttcaagtggcagaaagatgttttggaaagaatgccctgctaaagcataattgttaactgcacccatttgctgatcaggtttcattgtgcctccaccttgagccattgtgtcctctgagacgcctttcatgactggcaaggccatcttgacacttggaattgcaacttttcctaagacaatcacatcgcctttaatagcggcattcacaatctgttttgtatcgagtgaatcaaccttatcaaaatcaaagctcgcttttttatgttggtttttcttaatttgagcagctgtgacgtccatctgacgatgcgccatcattttaaccagttggttgcggattggattgatgaagaccaacactaatccaaccactaacagaatggctaataagccattaattaatcggtttcttgtctttttttacataacagtttaagcccttcactagtatttacgactattgtaacacactattttatatttaccggctctaaatccttgtgattcgcaattaataacagcaacacataaaaacgcacaaccgaaactttcggctgtgcgtttgttgtttattttacgtttaagatgtacataaagaccacgaaaacaaagaataaaacatacataattggatgaatttctttgcgacgaccagctgtaatcattgtgattggatagacgataaagcccaatgcaatcccgtcagaaatactgtaagtcagtggcatgcctagaacgattaagaaggcaggaattgcaatttctaatttttcccagtcaattttcttcaatgattgagccattaaaacaccgacaatcactaatgcgggggccgtcacttgtgacgtgacaaccgtcaataatggtgagaagaataaactgaagacgaataacacacccgtcacaacggccgttaaaccagttcgaccaccaacagcaatcccagcggacgattcgacaaaggccccaactggtgatgttccgagtaatgacccagctaacatggccgttgaatctgataccaaagctttcccaacgcggggcatcttgttatctttcatgaagccggcttgttcagctaaaccgaccaatgtcccggcggtatcaaagaaggtcactaataagaaagtgagtacaacgacccacatttgaacggtgttgatatcgccaatgtgatttaaaccagctaagaaagtgggtttcaaacttggcgcagctgcaacaaagtgtgttggcaacttaattaggccactgatggctcccacaattgaggttagaagcatcccgataaagattgctcctggtactttacggaccattaaaataacggtaatgattaagccgaaaacagttaaccaagtcgtcccttgcgagaagtcccccaaaccaacaatggttgatttgttcgcaacaatcaagccaccaccgtgtaaaccgatgaaagccacaaacatcccgatcccagctgaaatcgctagtttcatattccgcggaatggcatcaataatgatttcccgtagcttaaagacagtaaccaacatgaagattaatgaagccacaaatacacccgctaaggccgtctgccatgacacacccatcccgataaccactgaataactgaaaaaggcattaatccctaaagctggtgcggttgcaattgggtatttagcatataaccccatcaagaaacacccgatcgcacttgctaatgctgtggctgcaaaaacagcccctttatccatccctgaatcacctaaaacgctcgggttaacgaataaaatataaaccattgaaataaatgtggtgaatcctgctaggatttcccgttgcactgttgaatgttgttcttcaatcccgaagaagcgacttactctttccataacgactcctctaaaccaactaattttcccactatctttttagtggtaatgtgtgtataatactgactggtgccaaacccatgagaatgaaagtttgttggcgtgtttaacgacacgtttagaaaacgaactttgcattctctttttttgtactctttttcagcaatacctaccagatagcagataagacatttgtttgttcacgatctggaccaacagcaaatgttgctaatggtaaatcaactaattcttgaattcgttcaacatagtgccgcgcattagctggcaagtcttctagcgtcttagcacccgtgatatcttcatcccaaccaggtaattcttcataaatcggtgtgcaacgttctaattcgcggagacttgctggataacgatcgatttgttcgccatctaattcgtaagcgacacagatcttcaatgttttaatcccagttaggacatccacacagtttaatgataattgggtcacacccgccactcgttttgaatgccgaagcacaactgagtcgaaccagccaacgcgtcttgggcgaccagtaacagtaccatattcatgaccggcttcacgaatgaagtcgccagtttcatcatctaactgagttgggaatgggccatcaccaacgcgtgaggtataagccttagccaccccaaccacttcgtcaatccgtgaagcaccaactcctgaacctgttgaaacgccgccggcagggtttgatgatgtcacaaatggatacgtaccttggtcgatatccaagaggatgccttgtgcgccttcaaataagacattccccttttgatccaaaacatcattcaaaacaactgaagtatcacaaacatattgtttaatttcttgaccatattgataatattctgcaaacattgtctcatattcaagtggttcagcaccgtagattttagtaaagagcgcatttttttcgtctaagttttgttttaatttagttgcaaagagttccttgtccaataaatcggcaatccgaatcccactccgagcggctttatccatataagctgggccaatcccacgattagtcgtcccaatcttttgatcacccttggctgcttcttgtaagccatccaatttagaatggtatggcaagataacgtgtgcccgatctgatactcttaattgactcacgttgatcccttgatccgttaaatatttcaattcagaaacgagggtcttcggatttacaacgaccccgttgccaatcacgctgagtttgtcactgttaaaaatcccagatggaattaattgtaaatggtaagttgtgtcacccaactgaatggtatgacctgcattgtcgccaccttgataacgcgcgatagcatcagcattttgacctaaaaagtcggtaatcttgcctttaccttcatcgccccactgtgttccaacaactactacagatgtcatataaacatactcctctattcgaatccgtcttcagatccgctatttaaaccctaaaactcacaaaaactattgtagcaacaaattatctcaaaatcaatataaaagacgaactttaaaatctctaatcagcctttattcagtaaaatcttaacgatacatataaccgataaaatacgaacgtaaataacgaacaatgatccctgttttgacaggcgttcattaaaaaatacaatataaccacatctaacaccaaaggagctcatcatggtttacgtcagcaatatcattactgcggcaattgccttttcattcgtcgcaatcatcttaaccgttccactgttagtttaccactatcatcgttatggttcgctaaccatcctgcgtagtgtaattctctacagcttcatgttctacttggtagccgcttactgcttaattattcttcccctcccccacgctcggtggtcgctcatttaaccacccctcgctataacttagttccctttacgtttgtccgggagtttatcaactcaacccatttcgtttggaccgaaccgagttcatacctcgcaacacttaaacaagcggcaaccattcagccgttgtttaacatctttttaaccgttccatttggcatttatttacgttacttctttaaaacgtctttcaaacagaccttattacttagttttacgttatccctattctttgaactcacgcaactttccggactgtatggtatttatcctcgcccttatcggttatttgatgttgatgacttattgatcaacatctctggcggactgcttggattttatctccagcccttggtcacctttttcttacccactcgtgaaagtttggatcaagcagcctatgcgcgcggtcaaaaagtgggctacttccggcgcttattggcacttgccgttgattactgtgcgttaggcatcattacatttgcaattgctgttatctggcgattactaaaactacccaccattcattcagaaatgcttcagtactgcctggcaactggtgcttacttcttaatgctccccgttttttggcgtggcaaaacacctggtcaatctctcctgcaactacagattgtcgctgaccatcatcaccgttgggcgatcttctggcgccagctactcctatttttcatcgtcattcccagctttcaactctggcgcgtcaccctggatgccgctgttgctagtggccaacaacattttgacgtctatctctttattatcggtctctcactcttaccaccactgttattcaccggtaacttcttattaagttgggtgactaaacgaccacaattattctacgagaaactaacccatacacgggtcattagtagcattcaccccactcagcaaccttaaaaaagccttaaaatcatctttaattcctaaaaatagttaaaatcggatactttacggcttgaattggctatactaaaggtatcattcgctttgagaaaggattattgcttatgtttaataaattgaagttcctcatccccattgcatttactgctattatcggtctgagcgcacaaccggcctttgccgacagcaccacatcgtgggacaaacccgttgccactcttgggactagcctttctagcacccaaaaagctgataccctcaagacactggaaaatgccgcgaatgtcacagatgtcagtgaactaacagtgaccggttccacacttgtaaaatatcttgatcaaaatcaacaaacatttaacgccaactcaagtgtctactcaagtgctttaattcaaaaaaatgacagcaataccggcatcaatgttaaaattatcgattttaatggccataacaacatcaccacaattacagccaaccaatataaaaatgcggccttaaccgccggcgtcacgaatgcgacaatttacgtgacttccgccattccaatcgatggctctggcgccttagctggcgtttacgccgctttcgctgaaaatggcgattcactcaaccaagcgcaagtaactgctgctcaagacgaaatgagcaccctcagcgatatcacacaggctaataaaggcaccgatggttattcagattcccaattgaataatgccgtcacaggtgccaaaaaagacatggcaagtaagggcaataatctgactgttaaccaaattactaccatcgtcaataatcaactcgaacaaaacaacctcaccaacatcatcaacaataatcaaaaacaacaaatcattaatgttctcgttaaaatccaagattccggtgctttaaattcggatgatttcaagaatcaagccggtaagttaatgaataatatccaaagtggtgcgaaaaacatcttcaataagctcaacacccaaagcaatcggaacttcattcaaaaactctttgatagcatggctaatttcttcaaaggattatttaactaaataacacaaaaaagccccgcaaacttcagtttgcggggctttttatttattcattatttcgttgttgcttttaaggcaactgcgtctgcagcaactgtggtactcattgcgttaaacttaatgtaatcaacagcgggcatgttggtaatgatcaccatcattgccgtcttcttaccagcagcagtaatttgattcaaatcaaccgttgctaataagtcgccatgtttgattgtttggccttcttcaacagcgactgcaaaaggtgcgccgtttaattcaaccgtatcaattcccatgtgcactaagacttctaaaccgttcgttgttttaatcccgattgcatgtttcgttgggaacacagtcataacagtcccatcaactggtacaacaattttgccgtctgttggaatgacagcgtagccatcaccgagcattttttgagcaaaagttggatcatcaacattttcaatatcgatcaattcaccattagcaactgcatagaaaacatctgtttcacctgagttaatatcgctatcaacaggtgcttcaactggtgcggcagcttgttctggtgtacttgttgcgattggcgtattgtggttataaagttcttttaaagcatcagcaacaaattggacttctgtcccaataataatttgaatgtttgttttatctaaaacgttaatcccagcagtaccaacagctttaatcgctgattggttaacattggcagtgtcttctaattgtaatcgaagacgtgttgtacagttgtcaatcactttgatattgtctttgccaccgattgcagcgtagatccgttttgcttgaaccatgaatttatcatcagtagcgtctgtttcaacgccagcagtatcttcatcaacagcatcttctgcttcacgacctggtgtcatcaagttaaacttcttgatggcaaagttgaacccaaagtagtaaataactgccatgaccaacccttcaaccaataacatcaacggttggttagcaactgggtttttcaaacttaaaacataatcgactaatccagcactaaatgcgaaaccggctgtccagtggaagaaagcagcaacagccaatgaaatccctgtgaaagctgcatgcaatacataaagtggccatgcaacaaacatgaatgagaattcaagtggttctgtcacccctgtaaagaatgacgcaaaaccagcagctaacatcaatgaagctgttgctttacggcgttctggacgagcatttttgtagattgcgtaagccccagcaggtaagccgaacatcatgactgggaagaaaccagcttgatacatccctgtcttaccaatcacagctgaaccattcgcaagtgatttcgcaccacccaagaaattcccgatatcattaatgttagcaacatcaaaccagaacacagagttcaaggcagtctgccactaccactatcactaatcaatcaacaattcgcttcattggctactgactttaaaattcgtgcctgcaaaacgggaatgttggcagatgctgaacatgttgcaacggtcgctgaaaatctacgccattatgattgggggccgctcacccttgatcctgtaatgattgccaagggcggtgcacagctacttgccgacgatgccatcgataccctacgtactgaattattgccgctagccacagtgctgacacccaacttacccgaaaccgaagttctcacgggcagccgcataaagacaacagctgatttcaaacaagcggcccaccaactccaacaaatgggcgccaagaatatcattatcaaaggggccatttagactatcaatcacaagccgccgattacgtcctctacgctgatggacaagatgaatggttaactacaccacgaattgctactaaacgaacacatggcactggagatacgttttcagcttgtttaaccgccgagctagctaagggcacccctttgaaagcagcaattcatattagcaaagcctttatccaagccgcaattgctaatccgattgctgttggtcacggccacggaccaaccaatcactggacttatcaggaggttcatcatgactaacatttcccgggaaatgttccaaacttatttggtagcgggtacccaaaataccggtatggatgattttctaaacattctcgaacaagcactacaagcaggcattacctgtttccaattccgtgaaaaaggtgctggtagtctgcaagattccgatgcgattttaaagtatgcgacagcggctcaagccctttgccgccattatcaagtcccatttattatcgataacaatctcgatttagcacttcaaatcaatgcagatggtattcatgtcggccaaagcgatcacccgtggcataaaattgaaacggccaaagcacacggcttaataactggtctatcttgccacactgaacaagaacttcaccaaagtcataatcaaccgatacttgattacattggcattggtccaatttttccaaccaattccaaagaagatgctaaaccagcacttggcactaatcgcttgcgtttcttaacgcagcaaagtgaactaccggttgttgcgattggtggtatcaaccaagaaaacgttgctcaagtcgcaaagactaccgtggatggagttgccgttatctcagcaatcacccacgccacagatatcgctcaagccgtccaagcattacaaaagccatggcaccgcagtactgatgaaaaccaatcgtaattaacccttattacggtttgacccattctgaatagtatttgctgccagtttgatccaccaaacatttaaaaaagccgctagaaccctttttatagagtactagcggctttttctcggtagtttgctgatatttagcttagtgctttgttagtgatgactactccatttaacactactcggtaaacttattcattagcaagggcttcaaaataacttgctttttgctgcgcccagtaggcctcttctgcctcatcaatcggccggagtacccgacatggattaccaactgcaatcacgttatcaggaatgtctttagtcacaactgatccagaaccaatcaccacattgttcccaattgtcacgcctggattaacaaccgtattgccaccaatccacacatcatccccgatggtgattggcttaccatattccagatcatcccggcgttcttgtgccgtcgttgggtgaccagctgtgtagagccctacacgaggtccaaagaaaacgtggttcccaatcgtcactggtgctacatcaataatgatgcaatcgtaattcatatacacatgctcaccaatgcgtgtttggcaaccataatcagttctaaatggtggctcaatatataaatctgagccacttttcgcaaataaagacttggttaattcgcgtcggtaatcttgttgttcttcagtggtttgattaaacaaccgagtaagtacgcgcgcgtgtttcatatcggctcgcaattctgaatcgttcgcccgataaatttgaccattaatcatgcgttttttttctgacatttctttatcccccatcactactaaaataggtgcgtcacaattgtggcgcacctttttaatttaccaaattgcaacccgtttagcgggtgctaagtacatctgatcagctttcgttacattaaatgtctcgtaaaaggctgccaagttttggacctgaatattggcccgcaacgcgtttggtgcatgaacatcaatatttaacaataattgttgatattgctttgtagctttcatccgccaaatcgttgcccaattgacaaagaaggctgccaaatcaacatcaggttcttctttggctgcttcaagggcacaactcaagccacccgcatcggcaatgttttccgagacagttaatttcccgttaactgttgcgcctgcatattctaggccatcaaattctgcaatcatttcttccgaaagtgtcttgaagtgagctaaatctgattcttgccaccaattatgcatgttgccatactcgtcgaattgcgcaccgttattatcaaaagcatgtgagatttcatgtgcaatcactgcaccaatcccaccgtagttagcactgctactttgttctaaactgtaaaaaggtgcttgcaaaatagccgcgggaaagacaatgatattcttcgaaggtgaataataggcattaactgtggcagcgcccatttcccacttattacgatccaccggttgagtaagtttcgcaaaattttccgtttcaatcgttcgaataaagtcagctgtattttcaaataatgtcccatcttctgctttaggtactgtgaccaacttcgcaaaaataggggcaatctgatccgggtaaccgacatgaatcccaaggtggttgagttttacaatcgcttgttggcgtgttttttcggttagccagtcatttttttcaaggcgtttttgataaacaccaatcattttttggaccatcttttggacgtcggccttggctgcttcaccgaagtattgccgaccgtaataatcgccaacaacttgattgaacatccctaaggcaaggtagtaagcactcttttgttgtggacgagcttccttgctaccagataacgcacgactatagagcgaactaatttggcgtgcctcttcattcagataaccgctccaactacgaactgtcatgactaacagccacgctttgaacgtttcgaaattggcgtctgtcacaagctgactcagttgcgcaaaatacttcggttccgtcacgataattttttccggttgaacaggtagcaccttgctaaataaacgtggaaaatcaagcgtcgtttgttgttgcataaaatcactcaaaggctgtggattatagagtttcgtgtaatccgctgcttcttcggcactcttcacataaggtgccagtgaccgatcaaatgccaacgctaatttaaccgtcttcgttgcatcaacgggcgcaatcccaattttctgcaagagctgaaccatcatatccgtaaagacggccaataaatggtcagcattgggattgtcagcttcataataggtcttatctggcaaaattaagtcgctagcttccgcatacaacgcgtgatgggctgtgtctttcatgtcagcatcgacagataagccaaatggtgttggtaacccggaaagtacccaatcagctaacccacgattgtaagttgctaaactatcgagagattgcacccgggctaccattggtaggatcggtttcataccgagtgcatcccgcgtttgaaagtccgcagctagttcgtaataatctagaaaatgttgtaacaatgcgttctttgcggtcgacatcttagcaaaatcagccattaattgctgatcaatctcatcaaccaaggcgacaaagccgcctgttgctggtttatccgctggaatttcagccgtttttaaccattcttgattcactgccgtataaaaatcatcttgcattcgcacgtttgtcatcattgtcctcctcaaaagcagattctttcccaattttaacattttgccactttttccgttaatgctttgacccccataattgcaaaaaagccgcaatttagcggctatttcgttggtaattgtttttcaacttgataatttgaatcttggttaagtttaaacgtcttcttcaaaccgtttgatagatagattttattatcttttgtgatcatgatggcttggatattcttcggtttgttgttgatgagctgcatgccttcgacaatccccttattaaagacagcatttgaaagggcatctccatctactgatttaggcgagataattgtgacactcgctaggttattttcatatgggtagccagtatggcgatcaaagagataaatgtaagtatgcccgtctttttttagataatgttcataaatccctgccgtaacaaccgaaatatcacggcctttaatcgtaccgactgattctccacgcgcctttttcggatcttgaatgccgaccgtccatggtttgttcttccctaatggtgaatgccccataacaatcacattcccacctaaatcaataacggctgatgtcacaccatttttcttaaaaacttgtttaacttgatcggcaatgtaccccttagcaatcccgccaaaatcaagtcgcatgccttttttcttaaggtaaactgtacgtttggccttattcaaaacaacgtcatgataatcgactaatggtaacgcttggtcaatttctgcttgtgctggcacccgcgcgcctggtaacccaatttgccataaatctgtgatcgcaccaatggccatatcaaacgcgccatccgattcttgactataatgtaacgctttttccattagtggccacatatctttgctaacctgtacaggtttaacaccggcgttatcattaatcttatccaattcggaacctgatttggttaacgttgcttgattttcggactttttaatccgcgcaaaagccttatctagcacggcttccttgtctttattatagattcgcaatgtacaaatcgttccgagatagtaatcacttttttcatagggctttttgaccaacgtttctttgtccgctggcttactttgacagcctgccaataccagtgtcacccctaagagtgccaatccgaattttacccatcgtttttgcatcgttcaatcgctctccttgctactaaaatcacatggctctatcataccatcaatccgctttaattagttgtaaaaatcttctactggcgcgattctttgagttgctgataggtggcaattaatgctttaaaaacacctttatccgaataaactagaatattcatgcgatagataattaatgctaaataagtcagtccaattagtgtcgccatggctatgaagagtcccatgctagccccgaacgcgccaacatcaccgtttgccagccgcacaggtaacataatctgtgaaaacaatggcacatagctcaccgcccgcaataatggaatatcggtctgtgatgccagtacaaagccacccaaataacttaatgtgcccagtaaaatcaatggcgaaatggcttgttgtacctgatccattcgagacacaacagcgcctaacattgcagctaatacggtgtagagtaataccccaataattaaaaagactcctgcataccacattgctggcgcaaccaaagcacgacgaataatcggcaataactctgctaacggtagttgctgtttcaaaaactgaaacccgacaatcccaactaaaatatagacagtaatttgggtgagtaatagggctaatatcgcggcaatcttcgcgaaaaattgaatttcaatcgaaacacttgatagaatgatttccatgattcgcgaccctttttcagtcgcaatttcttgggcaatcattccagcataattcacgataaagatgaacattaagaccgtaattccaattgaaataatttggcccacttctttagtgttttcctgggaaatcttttcatgaccattctggtaattaaccgtcactggtgcaatgacagttggcgtcatcaatttctggatctgttcaggtgcaacgcctgcttgttgcgccaaagctactaaatgaatctgatttaactgattctctaagacactcgcatcaaatgatggactatcttttcgttcatagtagcgactgattgtctgtcctttttcctcactcaacaacaaatagccatcaattcgctctttctggagcgctttggtggcttgttcccgagtcgtaatctgctgatcgatttgatatgttttaccttttaactgctgtaattcactctgttctgctggttgcggcgccaaaacagcaattctaacgggttctttgctatgatccatcaagcgactcacaccaaacgtaatcccgagcatcacaattggcatcaaaatcatgattagatacgctgggcttttaatattctttagaaatacttgtttaaaaatcaccttaaacttaaacatggccttcctccactttcattctaaagatttcatcgagcgttggtgcttgttgactaaactctaggatatagccattttgtgtcgctaagtcgaaaatcgttttaccaaccgtttcgtctgccaaagttaattcaaaccgctgcccgtgctgtgttacacgtgaaacaccgttgatatttgctaaagtttcgcgtgctaacggtgcttctaagaataattgcgttcggccaaactgattccgaatttcatcgattgtaccggcgagcaccacttgcccatcgcgcaacatcacaatccggtcactaatccgcgcaacattcgtcatatcatgactcgaaaaaatgattgctgaaccttgttctttaagccataaaataccttcttctaaaagttctgcattcactggatcgagtccactaaagggttcatcaagaataatgagttccggttgatggatcaaagtcgcaatcaactgcactttttgttgatttccctttgaaagatccttgattttatcagtccgcttacctttcaccccaaagcgcaccaaccactcatcaatctgtggtttgatgtctgcgatgctgcgcccacgaagctgtgcaaagtacaaaatttgttgttccacggtcatctttggatacaatcctcgttcttctggcaaatagccaagttggtcataatccgcagcggtaaacgcgcgacctttccagagaatagttcccgtatctggtgccatgaaattcaagatcatccgaaaggtcgttgtctttccagctccattttgaccaattaagcctaatatttcgcccgacttaaccgtaaatgaaacatcgtcgaccgctagcatcgttccgaaacttttggataaatgtgataaagtcagcacgtccccaaccccctacttttcattaccttaactataccgtattcatttagaaagcgcattatctctcaatgaaatattaaaattactgattaaatcttaatagttgaaaaatatttgctatactacaattatttattattaggaggcaaattctataattaatccgaacagaaattaaaaagcccaaagcaatcacttacaatggtagtagctaattccaaccaatatagggagtgattactttgggtacatctactttatcacgttttcaacgtggcgcactagcacaactggtcaatgaggggaataaatcttaccaagtaatggctgacgccttaggcgtcgccaaagctacgattagctatgagttggaccgagttaaaccttatgatccagaattagctcagcaagatgcagatcgcaaaaggcggaattgcggtcgtcgttcgatgctgacggcagcattagcgactttaattaccaatcacttacgattaacctggtcaccagaaaccattgcggtcgcttataacttgagcactgcgtcaatttataattggcttaatcgtggctggctccccttcaaattgactgatctacccaatcggaatgtccgccagcaccgagtgagcgaaaatcgtgggaaatttacaagtgggacttccatcgaacaacggccaacaactgttaatcaacggttagcttttggtcattgggaagtagatacggtgctttctagtcgaagtgagtcacgatcatgtctggttacattcgtagaacgtaagacccgacttctatgggccatcaaagcccctaatagaacggctaaggctctaaacaccgcctttggcaagtttatgggggccttcggtccccaagtaaaatccattactgttgatcatggtaaagagtttgccaattatcaggccttagaacaggattatcagatcaaagtttatttttgccatccatattcaccatgggagcgaggttccaatgaatattttaatagacggttacgctggttcttcccgaaaaagaccaattttagccaagtaacgactgatgagatcctagcagcacttgaactaattaatcaacgaccattaaaaatacatcatcaacagactgccattgaaagattccgggcttgttcggattaaacttgtaatttgccaggaggtattattttgtccccaaatcaagccttttttctcactgttattggttgcctgttagctatcagttcatcttattttatcgtgcgtctcaatatgctaaagccaacactcaagcaaaatttcttggaccaatatcctgacacggatgaccaagcttacaaagcgcaacaatcaatgaaacaagcttatttcaacgcatccttttacaagcaagctgttcctttaacatcttggttagtccttttattctttttatcaatcggtggctgtctaacagcgctctatctagatgccctgaacattgcaatccgtcttttggggagtgcattcatttttatcgcgtttctctaccttaagttgccgacttttcaagcacagcatactttttggaaatcttatctacaagcgcatcctgaaaatgaattaaaagtcgtcatactcccactcgattcacccattcaacagcggcggattgccttactcaccaaatttaaatgttgtactcttgtagcaggtctcatattgttttacgcctctctttttctataactcaaaaagcggcaccaaccattttatggttggtgccgcttttttaattaacgaatttcaattgggttcgttggttggtctgattcacttaacttcggtagcatcaattgtaagacgccatcttgatattgcgcatcgatttgatcccggttgacaccaggtaggtagaattgccggctaaagcgcccataatgccgttcgctttgaacgatattgccttgactgtcactatgatcagcgaaactatcacgtttagcactaatcttcaatgtattatcttgataatccacgtgaatatctttcttgtccagtcctggtaaatcaaccgctaattggtaatccttatcggtctctttaacatctgttttgagtaagttgtccgtttcaggcgatattgccaataattgctgaccgaaattcttgaaccaatcatctccaccaaaattatctagccaattttgacgaccattcattaattcgtttgccatctctaaaacttcctttcttaatctttacaactctattctagtccgttaattatgaaatgcaagtaattagcactcgacgttgttgagtgccaatttttaaactagaccactgatttttcagctttttgatacccgcctaatatggttttgtgctatacttaaggttccaaaaatattcggaggtaggttcatatgaaaattgttgtcttagcgggcgggcgtagtaccgaacgtaacgtttcattaacgtctggacacaaaattaccaatgcattacaaacgaaaggccatgacgttgctttcgttgatcttttcttaggaaatgatttgcacgacgtcgcatcaatcgatgatctttattcttcaacacctgttgaaaaagattacgacatcagcgacgaagttttaacagacgacgccatcaacgcattacgtactgatggttcaacacaactctttggcccgaatgtcttagagatttgtaaaactgctgatattgtcttcctcgcacttcatggtggcgatggcgaagacggtaaagtccaagcggttctcgatctctttggaattccttataccggtagtgacacactcgcagcaggtattacaatgagtaaaaaggtttcaaaggaaatcttattatataaccaaattccaactgctcggtttgtcgctgcttatcgcgaccaacccatgccagaaatcccatttgagtaccctgtcgtggtaaaaccaagtaacggtggctcaagtgttgggacgcatatcgtgcacaacgaagctgagttacaaccagctgtcgaagatgcacttcgtttcgaccgcgaggctttaatcgaagaattcattaaaggtcgcgaattctcacttggcgtgattaatggtcaaccattacctgccattgaaatcgtcgttaatgacggttggtatgactttgagcacaaattcgtgactggaaataccactcaatttgtcacaccaccaaacgatttacctgatgatgtgcacgaagccatgaaacaaatggcacttgatgctatgcaagcacttggcttaacgaactacgcccgcatcgacttcttctggagtcctgaaaatggcttacacgtgatcgaaggaaatacattacctgggatgacgccactttcattaattccacaagaagcagaagtgcttggtatcagttatcctgatctttgcgaaatgattgttcaaggtaaattagaactccttaaagcaaaatagccaataaaaataaccctgtcgacgattttcagtcgacagggttatttttatttggttcatttaaaactgattacttagttcctgattaggaactattcttaaaaaaacacgtcgattggaattcccaagcggtcatgtagtaattgaatttctttgacggtaaatggaatcttccctctaatcttacgattagccgtcgttaatgttttgcccaatacatcagcaacaacttgctgtttcaaatcatgaccctttaaataacctgatagaacaaataatttttctgccacattcagcacccccaagaaacgttatcaatcccgttccacattaggaatattacgataatgtaagaactctgtcaattaaaaactttagtcccaagtgttcacttattgacgtcatttgtcatataattaaacttataagtcaaacgcgtgataaaggacggtgctaaatgttcggacaattattacacgataagcgaactgctaagaatctaacaatgcaacagctcgccgatctactcagcgcaaaatataataccaagattagtagctcaatgatcttccggtgggaaaaaggcgctgccccatcactaaaagcattatttattgttgctgtcgaattgcaaatcgaccttaaccaattggccacccttgttgcggattctaaccgcgtcaattagccgcttttttttgtttttttcccgatttttgaatggtcttcacacctagtacatctaaaaagaacgtaaagattggtaatccaacaattaacccccaagttcctaagaaacgttctgctacaaataaaacaacaaatgtaaagaaaattggcagctgtgttttactcgacataaatcgcggattcaaaacatatgcttctagggcatgaatgactaaaatcatcaccaatatataaaccacatactgaattccgccgactgaaaaggcgataatgcacaatgggatacatgaaacgatgactcctgcgaccggtaccatcgacaataggaaaatcatgatggctaaactcggaatattaggcattttcattaccgttaacgtaatcgttgttaacactgtattcacaattgcaatgaagatttgggcttcaattaccacgccaaaggtattcacgaattttttagcaaaatacatgatatcttggaagaaccagccgtaagtactcttcaaaaagagttttccaaactgcggtaatcggtctagctcaattgtgtaaaagaaactcaaaataaacgataagacaattgtgacgcccattgttccgattccggtgatgtaattaacgattgttgatacaccgtgtttcaactgatccgtcaagttgaactgtttcatgtaatccccaatggttcgcataaattgattcgcatcaaatgatggactttggtagaaattatagacactctcgcctaatttaattgactgtttagcaatctgtggcacataaatcgttactgctagatacactaaaaaaatcaccaacatataaagcggcacaaccacagctgcgggcggaatttttgaatactgttggacctttcgtactaattgagtcactaaaaaagtaaagatgaacgtcagcaaaatgatattcatcatcgagcgtgacacatagatgaccccaatcaacgttaagagcactacaactcgtcttaactgctgattcgtcacaaatttttgatataaactcacgcaatttcctcctatggcaattctatatcattattttacaacacttcgaactaattggatattctggaattccgatagttgcaacttacatctttttaaaaatagtcgtatactactctggtacttcaaatttacacctagaaaggattttcggtatgttagaaaaaactttttataagaaactactacaacactcttttgatttccctgttaccgtcaactattgggacggcagctccgaaacctatggttctggagagcctgaagtagcgattacttttaaaaaagcgattcccatcaaacaattgtccagcaacgcatcattagccctcggcgaagcgtacatggctggcgaccttgaagtgacaagtaatacaacagataccccacttcaaaaactattaacggcggcttacactagcgcagacagtttcatgcgtaatagtcgctacattcatctgattccaaaacaatcgcattcagaaaaggcaagtaaaaaagatatccaaagtcattacgatttagggaatgacttctaccaactttggttggataaaacaatgacttactcatgtgcttattttgaaaaaccaactgatgatttagagacagcacaaattaataaagtgcaccatattttacgcaagctcaatccacaacctaaccgaacattgctcgacatcggctgtggttggggcaccctcatgttaaccgccgctaaagaatatcatctcaaagtggtcgggattaccttgagtcaggaacaatatgatttcgttcaacaacggattaatgacgagggccttagcgatgttgctagcgtccaacttgttgactatcgcgaactcaaacacgccccattcgattacattaccagtgttgggatgtttgaacacgttggtgaagaaaatcttggtgcctacttccaagatatcgctgactacctcactgatgatggggttgccctccttcatgggattacccgtcaacaaggcggtgcgcgcaatgcctggattaataagtatattttcccaggtggctatgtacccggtttagttgaaaatacacaacacattatcaatgccggactacaaattgccgacatggaacccctccggcgccattatcaaaaaacgctggaaatctggactgctaattttaacgcccaaaaagacgtcattttaccaaaagcaggtccagaattcgtccgcatgtgggatctctatctccaagcatgtgcctcatcgtttgaatctgggaacattgatgtcattcaatacctcgtatcaaaaggccccagcgcaagagacctcccaatgacaagagaatatatgtatgattagagtgctgactgtcgcgcttagtcattgagcattaattcaaaaataacataaatccaggttttaggatttatgttatttttagattaagcggaaattactgcgacaggaagcacgtttagagtgctgagtcgaacgggttggctttgaggattacccaaaaaagacccgctaatcaacaatgattagcgggtctttttttattgccttattttaaaagcgcttctgccttttctctaacttccgcgtcgctcatcttaagatagggtttcattgcctcaacggttttatccgtgttccggccgttggcttccatatagtgatcccacaaagcatcacggacgattgtgttatcgtcactccaatcaaatgcttctgacatcttcatatctaaaaccaatgttttttcaacagctgctgccatattaaaaacctcccatttcttttttacaactctaatgataaacctcttttgaaaaagtgtaccaaaatacgcacttttattttttagagtcctgttagtaggtttaaaatcacgatttggctaatgccaattgccaagacaacatgggttaagatttcaaataataaaatagcatagacgcgatcaaaagctgcccatcgagtttgaaataaactaatcccaaccgcaatgttcaaactgacgtacatcactgcaaccatgattaagacgaaccagatggcggtcatcccgaaacatagagcagccaacagcgcagctaatgctaaaataacggttatcccactgtacgcactaatctccgttagatacgcgcgcaaggtggttgtcgtcttcttcaataagtaacgcttgagtaaaaatccgattcccaaaacaaccaccagaataaatagttgtccaccgagtgccttcatatcaagcggtaataagtttagccgttggcgcaagacaatttgtgacgccatcaccccagcaaccgcaccaatttgttctgaccaactggcaatgagcaaacttgccgttgcagtattcattaatataaccagaccaaacgtgactaagccaaaccacaggttggcccactgccattgcacctttagcggttgttttaaactccgcgctaaaaattgatagtattgttgcaggagcgatgtttgctgttttgtttgcgttgattggtgcactagaccgcaattgggacattggtgcaatttacgcccatatttaatatggcattgtgtacattctatcattcgtctgatctccaaatacttaatttaccgtacaactgtgactgaacatggcgcgtatttcgctaaatagctcgcatgtgtcccgattaaatgtttagatggtttcgtctttgaaccacagatgaccaagtctggttggaaactaggaatcacttcttcaacaatcacgtgtcctggattaccttcatttaaaatcggcgtcacatcttcaaccccgaattctttcgctttttgaacataaacatctagatcggctgcgatttcttctcggcgcccttcaaccacgtttggtgagagtgattgataaatgttcaaatcgccggtttccaaaatgctgacaatccctaatggaatttgataggccttagcaagcgtacaagcatagttaaaggcccgtttggatgaggttgtgtcatcatcatcgatagcaattaataatttttgatagtgcattgattcaacttcgatatttaattggcgtttttctgtcattagttaagactcctcgtttatttaatcaataatgcttctttggcatgaattaatcccgtgattaattggttgactggggtcgcaatgtgcttttcggcgcctttgcgtgccacgtaaccatttaagtaatccacttcggttaagcggtgatgttgcactaaatcctggtgcattgaaggataatgaccacctgcttgttctggtgcaaacatcttgctgatgtgggcaatcgtcgtgggaatgtctaattcaacggcttctgttgcagcaaccgctgagaattccgccacaattgaacgcaagagttgttgcgcttgtggggtttggcccaattgtgcaatattacagtctaacaaggcacacaagctgttcagtgtcccattaacgcaggctttacgccagattgaaaagagtacatctgaactatattgcgcatttaagccagccgcactcaacaaggcaactaatgcttgtgccgattctttgccatctggatcaacattttgtaattcgacattcccagagcctgttaatgtaatcgcacctggtcccgttaaccccgccgtccaaagtgtaatgccgacaaaaatattttctttgggcaggtattgttcaatcgtttcgggatgcccgagaccgttcaataaacagactacttttgtcttagcaccgattaagggtttgatggcttgtaacatgtcgactagctgcatcgattttgtgaataaaataatgacgtcttgaacttctttaatatccgttggcaaagcagccggaattcgaacctgaacgggttcgtgccccgcttctacaaccgtcaggccattggtattgattgcttgaacgtgttctgcccaattatcaagtaacacaacatcatttccagctgattgtaacatgtaaccaaaacgactgcccattgcgcctgagccagcgattgcaatttttgtcatagattataaaagctccttttatgatttgaattctttttaatcatgccacatttttaagattttttcacccgtaaccgcttaattcaacttaaaaagaagctgtcaaaccgcttatagcagcctgtcagcttcttaaaataggaatttacgccttcttaaaattaattgatcaatcaataataagaccaagctataaccaagactcattgcccatgataataaaatatcaactagcgaaatgtgtcccaacgtgttgaagagttgcgccatggtcgaaacgggtggcaaaatccccagaatatagaggtagggatgccagtaattgacaatcgcttcacctaaactgccgagaaccaccatcaagatggtcaacgtaccggccatccggcgattcactaaaattcgccgttgccagaacaaaccggtcattactgaaacaggtaaaatactcgtcaacattaaggtcccgcctagccaatcccaccagctaagtcctcgaccaaaagcgtggtgcccattgagcacgtaagtaattgccaagcttcccatcccaattaggacaaagaataatcccaacaagatgagatagctaattaaactgagataaaaacggcattgcttctttaattttaaaattaaaagtttttccatttgaaggggaaattgattgatgtaactgtaggtcaaccacgtcaataagataaacagtgtcattaataatgtagcgaggctgccgacgaaatcttgtggttgcaccgcataattgactaataaggccactatccaaaatagcaaaggcccccacaaattcccattatcaaaaaccattttctgatgcaaacgtaactgtgcactaaaggacttcataacgtaacccccttaggctaaagccactttttaacattgcttgaattaattcatcactatttttgatatttgcatacaagacgacgtaccgcgtaccatcaacaatttttaaagctaactgttgtaaagtagcgggaagtgcgagtgatcgcggtgtagttgcaaattctaaccgcatcaccttttcttccggctgcggtaattcttcaatcggcaatagccgcatcgcatctagttcataaatttcagtagccaactgttcgattaaaaaagcgttgttagtgccgacaatgatggcgccccctttttggcggtagtctttcaaccaatgaatcatccgcatctgggtcgttccatcttgaccagccaacggttcatctagcaataaaatatctggggtccgcaaaatcgcctgcacaaagttcactttttgcagactaccgcgtgacaattgatttaacggtgtattaagtgccgccgctaacccaaattcataggctaattcattaatctgaccttctaaatttcgattgctaaactgatctaattctcctagcatccgcaaataagtcttaggtgtcagtccatttggtgcgagttgttcagccatatagccaatccgcatcttcggtgcaatctccagtgtcccgcgttcaatattcgtcaatcctgctagtacgttaagcaacgtggttttccccgcgccgttttgcccagtaatcgcgatacaagcttgccgatcaatccgtaaattgagacgtttaaaaagttgtcgccgctgatatttttgcgaaaaatcacgcaattctagcactgctcccatttaacttgccaacctttactggattattttgcttgccaattagcgatgttttgcgcagccaaagctaaactcaacacagcatctttagacaaatcagcttggattaagttatgtttaacggttgcagccactgcaccaatgacagccaaaccatatgtcaacacttctaaatcgcgtttaacgagatattgatcttcataaacagcttcgtggctgtattcaaagttgactttgttttcagctaaaacaccatccacgtgggtcaccataatccgatcggtcacatcgattaataatttgtggtcatctgataacgttaatttatgatctgactctgattgataatatgtttcttctgtaatatcaaaatacttaacgaccgggttatttaaaacgccaaaatcatccaaaacagcaaaaattgtttctggatttaattgcactttgcgatcggcaattgctgccatgttttcttctaaccaatctgctaattggcgaacattatcctgtgtcatatgtgggactcctttaattaatctaaatgaattctatccctccataatacaccatccgcaatattagcgcgactgactgcaccaaaaagttactgtgacatcagatgatcatcaattacgccagctccttgtaagaatgaatagatgacgactggtccgacaaattgaaagccccgccgttttaaatccttgctgatttggatcgatagctctgattttgcggggacatccgcccaagttcggggccgatttacaattggctgtccatcaacaaagccccatagatactgatcaaagcttcctgcactcttttgtaacgcaaggacggcttgtgcattattgaccgttgcattcaacttagcacgattgcggataattgccggattggtcagtaactgctcaatttcggttggtgtcatctgtgctactttggcaatttcatagtctttaaatgctgtccgaaaggcagcacgcttatttaatacagtccgccaactcaagccagcctgatacaactccatacataatagttcaaataagcgttggtcatcatgttccggttttccccactctgtttggtaatacgccaataattcaggtgaatcatacatccaatcagcttttgtcattattaccacctcctaaattgaactacgcaaaaaggctaaaaagaattcatcctttttagcctttgggattgttatttattttttcttacttgctttttgataagggcgattttcaacatcagtcttgacgattaacacgtcacagatagctgtgcggttaacatattctgtcacagaacccatcaacatccgttcaactgcattcaagccagtagagcccatcatgattaaatcggtttgatattctgtcgggaagtcgcgtgcgataacattcttaggattaccaaaccgcacatgaatctcgacatcttttaaaccgtcattggtttggatatcatattttaaactgttgagataattctgtgcatcttcagagatttggaaaatagcgtctcctgaaagcatgccactataactccctgcaaattgcttggtatccaaaacgttcaaaatatccaagcgcgcctgattcatcttagcaacccacactgctttatttagtgctaattcagcttcttcagagccgtcaactgggacgagtattcttttatattcttgaaccatgttgttcatctcactttctctatatgcacctgttacactttaagaatataccgcttggaaaaacaattcaagcaaaaaagcgaagcgcttccgcgaacatttaattagaagtagtctttcttttttaaccaccaaccgacacaaaggctaatggctaatgacaatcctaatagcacgagaaaccctaacttactctcggctagcgggaccggtacgttcatcccccagaaaccacctaacgttgtcggaaccgttagaataattgagagtgatgttagtgtcttcataatattattcaatcggtttgaaataatatctgaaagcaaatcacttaactgtgccaataactcacgatacgttgtaatcgccttatcggacttggcaaactgcaagtcaatccgatacagtaagtctgtatgtcctgacacgcgctcaaataatggacttgccttaatttgcggaataatttgctggttactcttaagccctaaatccaaatagacaacactctttttaagagacttgagtgcatacaacaaccgattgcgtgtcgaaacatgtacattttcttccaattgttcaatctgttgcgcaacgaccgctaaagccgctaaataacgttgatagatggccgaaacactctttagagcaaccgtttcaatttgaccatccaggccttctaacgtgagtatttcatcgatgagctcggactgttgatgccccacagttaataacgtctggccactaatgattaacgaaaaaggccgcgtaatatattccgcatgatcttctgaatcatgggttttaactggtaccagtaaacaaatatgggtcaatacttcaccggtgtccgttgtaaatgtttcataccgtgcgacttcattgatatcttgggccacctcaaataacaccgctggtaagtggtattttttagcgaaatggtgcatctcatgtttagttggtgcttcaaaatgaatccagtcggcacttttttcagaggttccttcaaccaactggccctcaggtgtcatttcaaaatacgtaatcatctgctcactccactcttaatacccctatcatactgtttctccccacatactgacaagttaagttgattgcccattaaatatgctacaatattggtatcattggataaggagttgacgcatatgacacaccgcattttgccacttgaaaaaggccataactttagagaattgggcggctatcaaacaaaagacggccggacccttaaatggcataaagtcttacgttccgctagtctagcccacctaacaccacatgatttagcttatttaactgattatggcgtgcgctatgatgttgattttcgctcacctgaagaaactgccaagtcaccagacaaggtccctgccaatgcaatctatgaatccttacccgttttcaaaattgatgaaacggctagtacggcatcagaagctgatctttttaaaacgttcagtgctgatccaaaaagtggtcatgaacatatgattcaagtctatgtcgacttaattaaccaagatcactccaagcaagcttaccggcaatttttcgacttgttgctagcaaacgataaggaggaccaatccttactgtttcactgcacggctggtaaagatcgtactgggatgggcgctgttttcttgttgagtgcactcggtgttccagaagaaacgattcgcacagattacttattaacgaatcaagcttctgccgctttcgtgacccaatcgcttgcaaaactacaacaaaaaacacagaaccagtctgtgttcaaaagttatcagtcattactaacggttcatcaagattacctcgataccgccaaacaagcgattgaatccgaaaatggttcgttgcaagactatttatcacacgatctccagttaagccaacacgacttagctgacctgcgcaaaatttatttagcataacccatttgtttcacatgaaacttaaaaaaggagcgtggctttgaatgcccactttaaaagaacaagtgattgaggcgagcaaaaccatcggcatcgataagattggtttcacatcggcagcgccttttgattatttagaagcaagtcttaaggaacaaaaagcaaatggtcattcgactggattcgaacataaagtgcttgaagaacgcctttatccagatttaattttcgaccaacctaaatcgattatcgcgattgctcttgcctatccaacaaaaatcatcaataagccagcgcgaactggtgctaaacgcggtagttttgcccgcgcttcgtgggggattgactaccacgatattctgcgcgataagatggaccagctgatcagcgctatcgaaacacttgctgattcagatactgaaattacttttaagccaatggttgatacaggcgaactgagcgatgtggctgttgcgcaacgtgctgggttgggcttcatcggtttgaatggtttattaattacacccgaattcggttcttatgtctatcttggtgaaatcattaccaacatcccatttgaaccagacacaccgatggccaatcaatgtggcagctgtacgcgctgcatcgattactgtccaccacaggcattaatgggcgatggccgcctcaatgccaagcgttgcttatcctatcaaacacaaaccaaagggttcatgcccgaagaattcagaccaaaaattcgcagtgtcatttacggctgtgatatttgccaacaagtatgtccgtttaataaaggaaaagacttccacttccatcctgatatggagccagatccagaatctgtgatgcccgaattacagcccgtgctaaccatcagtaacaagcagttcaaacttcaatttggacaccttgctggttcgtggcgtggcaaaaagccacttcaacgcaatgcgattatcgcactcgccaacgtgaaagaccgcaccgcgattccgaagttactcgaactcatcgatactgatccgcgccctgtcattcgcggcactgctgcttgggcgctcagtcaattagtgcgcgatgtcacgcctgaaattttagactttctagaaacagccgcaaagcgtgaagaagaaccggaagcccaagttgaattcgacaatgcacttcaaattctaaaagaacgttattcagagaggtaggtccaccctagtatgtcagaaagtgctccgcaaaaaacagtccttacgcagccattaatccttttgatggcttttattaccggcgttgccgtctccaatctatattacatccaaccgattcaagcactcgtagcgaccactttccacgttacaagtggtgcggtcgggactgttgcaatgttgacacaggtcggttatgcacttggcttgttgctgattgtcccgtttggtgatgtgatgagccgttaccagctcatattacggatgcttggcttatccttactatccttattagccgcttacctagcacccaatttcattttctttgccttgactggtttgatgattggcctcacctcagtggttcctcaaatcatcattccatatgcagccgtcctcgctcaaccacaaaaacggggcgcagtgctcggcaccattctcagtggtcttctaatgggtgtgctcctatcccgaagctttagcggcattattagtagttacattcattggcgttgggtgtatctcatcgctacaattgcgattgcgcttttaatccttctggcagccctcaaattacctaaggattcccgtccaaaaaacgggccaagctactggcagacaatcagttcaattccagggcttatcgcgcaccagcggctgttacgggaagccgccatcaacggttttttcatgtttgggacacttagtattttctggtcgacactcattttctatatggccagtcccgcctatcgtctcggtagtggtaccgttggtctattagcaatccttggtgcggctggtgctttagctgcaccaattatcggtcgcttagccgatgctaaatcacctcgctttattatcgccactggcttattcatgatgaccatcagttatcttttattcttactctgggggcatttcatgccgattctaatgctcgggattgttttattagatgtcggaaaccagtgcggtcaggttgccaatcaaacccgggtccaaatgcttggtgaagccactagtagtcgcaacaataccgtcttcatgtttgcctatttcatgggtggtgcttccggttcattctttggcgccctcgcttggagcttcggtggctgggtcgccgtttgtctcttagcgctagcttatcaatgtctcgctttaatcgcccactttattctttatcgtcctaaatcaacaggttaattaatggccggtgtaacgttctcaattccgttacaccggctttttgatacctatcagtaaagcgtattcattgacagttgcatgttacgtatctaacatagttattatatagcaataaatttccaatcatcacaataggaggttccttatgacacattatctaacgtttgatcacgtttcaaagctctatcgcggtgataacaaagccgttgatgacatcagttttactgtcgacaaaggcgaattcatttgtttgattgggacgtctggttctgggaaaacaacaaccatgcggatgattaatcgcatgattaacccaaccaaaggaacgattaccttagatggtgaaaatctcgctaatgtagaccccgttaaattgcggcgaaaaattggttacgtcattcaaaatattggcttaatgccacacatgactattcaagataacatcacaattgtccctaaactcttaaaatggtccccagaaaaacgccatgcaaaggtgctcgaattactaaaattagtggaaatgcctgcggactttttagaccgttacccaagccaattatcaggtggacaacaacagcgaattggggtgattcgcgcacttgcagctggacaagatattattttgatggacgaaccatttggtgctctcgatccaattacgcgtgaggcacttcaagacttagtaaaacaacttcaatcagaactcggtaaaacaatcgtctttgtcacccatgacatggatgaagcactcaaattagcgtcacgcattgccatcatggataacggccaaatcatccaaatgggaacgcccaatgaaatcttgcgaaatcctgccaaccaattcgtcgaagacttaatcggtcacgatcgtttgatcgaagccaaaccaaatgtcgaaactgttggccaaatcatgcttaaaagtccagtcgctatcacaccaggtaaatcattagttgatgcgattcgcttaatgcgccaacgccgcgttgataccttactggttgtcgacgaaaaccaacatttaaagggactcgtcgatattgaaaatatcgaccatcattacaaagacgcaactagtgttggtgacattatgtctaccaagattagttacgtgaacgaaaatgatttggtccgggataccattgaacggattcttaaacggggctggaaatacgttcccgttatcaacgatgatcatcaacttgttgggattgtcacccggacagccctagtcgatgtcgtttatgatgctgtctggggtgatactgacgaatctgaagcagaatccgaccaacaatagaaagggaggaatcgatgatgctcacttttttaacagaacatggctctgatttactgattaaaacttgggaacaactctacatttccgcaatcgccttagttctgggcataatagttgcggtgccccttggaattgccctcacccgatttcctaaaactgccaaagtagtgattgccattgccagcatgctccagaccgtcccctcattggcactattggctttaatgattccgctctttgggattggcaaagtaccagcaatcatcgccttatttatctactcactactccctattttgcggaacacctacatcggcatgaacgatgtcgatccgattctaaaagatagtgctaaaggaatgggcatgacgccggtacaatcaattatgcaagtggaaatcccaatggcgacccccgtgattatggcaggaattcgcctatctgcggtttacgtgattgcttgggcaacccttgcttcatatattggcgctggtggtcttggcgacttgattttcaacgggttgaatcttttcaaaccggatttaatcatcggcgggacaattcccgtcacattgttagcattgctagtcgattttggcttgggccggttggaaaaacaactgacccccgctgcaatcagataaggaggctcctatgcataaaatacgccgattcattacgagttgcggattattagttggcagtctcctcctgttaagtggctgtcagtcacttggcatcggaaaccgtcaatcacaaacaattcgcattagctcttcaagcaccactgagtcacaaattctcgccaatattctgagcgagttgattacccacgaaacacaaaataaggtcactttaattaataatctgggttcttcaacggtaacgcatgaatcactaattcgtggtgacgccgacatagctgctagtcgctacgctggaactgaacttactggtactttaaaaatgaaacctactaaagatcctgaaaaagcccaaaaaatcgttaaaaaagctttcaaagatcgttacaaccaaacatggttcccttcctacgggtttgcggacacctatgcctttatggtcacccaggaaaccgccaagaaatatcatttagaaaccgtcagtgatctcggaaaagtggcggatcaactaacagctggtgtcgattccgtctgggtaaatcacgaaggcgatggctatcccgcatttaaagaaacgtatggctatgatttcaagaaagttgcgcccatgcaaatcggactggtttacagcgcactggcggctggtaaaatggacgtcgttttaggttactcaaccgatggacggattaaaagttatgacttaaaagtcttaaaagacgatcgccgcttcttcccaccatacgatgcgagcgtggtcgccactgatcagattctcaaagaacagccagcactagcgccccttttacaccgtctagatggcaaaatcgacctcgacaccatgcaaaccctcaactttaaagttgataatgatctactagaacccgcagtagtcgcaaaacaatttcttcaggaacataattatttccggaaaggagccgctaaatgactaatttaaatacttggcaacaacttgtctattatttccagcataatggcagttatgttttacggcagtttagtcatcattttttgatttcgatttatggcgttttacttgccgcgttgattggcattcccttggggatttttattgcgcaccggaaaaagctcagtaatgttataattggggtagcgaatgtcatccaaacagtgccttcactcgcaatgctctcaatcattatgcttggcttggggcttggcacacgaaccgtcattgcgactgtctttttatactccttgctcccgattatcaaaaatacttacaccggtatggagaatgtttccgataatattatcgattccggaatcgggatgggcatgacaaattggcaactgttacggatggttgaacttcccttatcattggccgtcattatggcggggattcgcaatgccttagtggtcgccatcgggattacagcgattggcgcgtttgttggtgccggcggtttaggcgacatcattattcgcgggaccaacgccactaatggcggcgccttaatcttagctggtgccctgccaaccgccctgatggccattatcgctgatgtgacgttaggctttattcaacgccacttagaagctccacaagcacgaccttaaatctcaacattaggaaggtgtcactatgaaactgtatcaagcattaacccaagtcacactaaacacacaaatggttgacgatttacctgattttcagattacaaccgttttagaccaaccattgaactttgcccctactcagctttaccattatatcgatgccgttttaaagagcggttctcgtcacgatgaaaataacctgttatatgtcacagacgcgatttttatcactgaaaactacaactttaaacaaactgaattcgcggcacttgccacaagcttcgaagaacgggtaacattagcgcgtaaaattgtggccgatctcaaccgccacgtctccgtcaatctcgatttagtgcaacatgaattccaactaatttttgtcgattagcacgactgccccaggcgatgttatttctacatctactggggctttttttattgaaatgaatgaacaggagtcctcactttgccaaatgcacagcgtcaaaatagcgcgctttataaactcaatcgtcccgccaaccaactaacaacggaacaacaagcactacaagaacaagtcattcaattttgtttggcaaaagcgcacgccgaacacgccaccttcttgattcaaggtgcggccgggactggtaagagcgtgattctcagcagtgtcttcaaggtactgcagacacttgcgcgccaaacacccacctcgccactctatggcagtcaaaacgttctattggtcaatcatccagaaatgctaaaactctacaaaagtggcacaacaacggcccccgttttattgaaaaaagattttcaacgcccaacgacattcatcaatcaagcggctaaaaaccaccaacttgccgatatcgtcctcgttgatgaggcacacctactgttaaccaaatccgacccctatagccacttcaatcaaacaaatcaactcgatgaaattcgccgacacagtcggatcaccattctgatttttgatgaacagcaagtgcttaaagtgaagagcttctggcaacagcaacaactccgccaacgaattgaagctgctccccatcagaccgcgcaactaacccatcaatttcggatgcaagcccatccaagtgttgaaaattgggtgcaaacctttcatcaacaacaagtcgctgccctgccacatgatccacactttgaattcaaaatattcaccgatgccaatgagctctatcaaacgattcgctttaaaaaccaaacgagtgggcttgcacgcatgctagctacttacgattttccagcaacactcaatgatggtcacgatcacttcgttgagacatcgacattcaaattacgctgggatcggtatcagccaaccgctaaaacctattgggcagaacgtgaagatagtatagatgaagtcggatccgtgtacaccattcaaggctttgatctcaactatgccggcgtcatcatcgggccatccgtcacgtatgatccacaaagtgagcggctagttattcatcctgaatattacgaggaccaagccgcatttgccggcgcagcacagccggctgatcctgaagccgcgaaacagcaaattattcttaatagcctctacgttctaatgagccgcgctagaaacggcctttacctctatgctgttgatcccgcacttcaggccaaattgctcagcttatgacaaatcgattttatttcccggggaataagtcggttttctgtctatctctatcgaaaacaagtaaactgtaagtagagattttaaactgataaaggagtgttttaatatgtctaacttaacgagttcatacacgctcacaaacggcgtgcaaattcctaaaattggcttcgggacttggcaaacaccagacggtcaaacagccgtagctgctgttgaagaggcgctcaaggcaggttatcgccacattgataccgcccaagcttacggtaatgaagggagtgttggtgaggccatccaagctagtggcgttgatcgttccgatttattcctaaccaccaaaatctggaatagtaatcacacttatgatttaacaatcagctcttttgaagaatcactcaagaaattacaaaccgactacgttgatttgctcttaatccactggcccaacccaattgcctaccgtgatgattgggaaacagccaacgccgaaacatggcgtgcaatggagatgctctacaaagctggtaaagtccgggccatcggggtcagcaacttccgtgttcgccatttagaagcgctcaaaaagactgcaacggtacaaccaatggtcaaccaactcttcttagcccctggcgaattagaacctgaaactgcccaatactcacgtgaacatggcatgttattagaagcttatagcccacttgggactgggaagattttcagtgtgccagaaatgcaagaattagcggacaaataccaacgctcaattccacaaattgcactacggtggtcattacaacacggcttcttaccattacctaagtctgtgcatgctgaatacatccaacaaaatgcccaagttttcgacttcgaattagccgatgaagacatggctgcaattgatgcacttgacggcgtcgttggacacgcgcaagatcctgatactgcaacattctaaaactgtttaaaagccactaacacagtggcttttttcgatacagatcaacgtcaaaatgtgacaaagcgtattttagtttagatatttaacaatttagtttacctcttccctaaattatggtattttcattattattgaatccgataaaatcggactaaagcccgacgttatttaccgttttaagcttgagaatggtaaaatagaactagttagttaagaaatggggaattattttgtcaagtggtgagttattcactaatctatttgttatgttggtcaccttctttttagccgccttcttcgtggccgctgaatttgcgctcgtccaaacacggccaagtgccttagaagatgccatccattcaggaaatggtaatcctaaaaaattgaatcttgcgcttaaaatgacgcaaaacttaaacgaatatctctcaaccacccaagtgggggtcagtgttgccgggattattttagggtggattggtgaatcaaccgtcgaaaccattctagtcgatctgctcggtctcactcacctgatttcaaatggtggcttacacatcatcggcgcagttgccggcgtgttagtcttaacctatttagaagtggttttcacggaaatcgtgccgaagaatattagtattgatattccaatgcagatgttgatggctgttgctaagcccctccattactgtcatattatcttctatccatttgtttggttactcaacatttccgcaacgggtgttgtgaaattaatcggcttttcacctgctgaagaaggtagtgatgtgctttcccaagcggaaatcattagtctctctaaaaatgccgtcactggtggtgaattagatcgcaacgatttagtttacatgcaacgggcctttgactttaatgaccggattgccaaagatgtgatggttgatcgcacaagtctctacgtcgtcgatatcaccgataccgttaaagacgtcttaaaagactacttacaacaaggctttagccgcttcccagtggttgctgaaaatgataaagacaagattcttggttacgtctacgcatatgatttagtccgtcaggcacaagtcgacgattcaatccgcgtcagcaaattactgcgttcgattatctccgttccagaagcaacccctattcacagtttgttgaatcaaatgatcaataagcaaaccccaattgtggtcgtcgttgacgagtacggtgggacgagtgggattgtcactgataaagatatctatgaagaactattcgggaccgtcaaggacgaaattgacgatgtttcagatgaatacatcatcaaagaagacgataaccgttaccgtgttagtgggaaaacgacgctctatgatttcgaacgtttcttcaagactaaaattgatgccttcgaagcctcagatagcgtgaccctggccggttatgtcttagaaaacttcaccgacttacaacaaagtgcggtcattcatatcaatcaattcacattaaaagtggtcgaattcaatcgcggttacatcgactggtttgaagtctccagcgaaccacaaaataatacagccaacaatacaattattgaaaccaattaaaaaaagagtgtgctatcagccatctcctgaggattaaccacaaggagatggctaatagcacacatttaaacaaaaacagccttgcgcaaatgcgcaaggctgttttttaatttcgttatgctaaataatcacgactccagatgagccccattactttttcgccggtgtgcacgccgaccacaggaccaatgtgactcgtttcaatcggcatccctgggaatgtttccgtcaacgttgcgacccactgcacactttcttctggattattaccgtcaatcacgctaacgcgtacgggatagtcaacagattcgactgctgctttgaaatccgctaatactttttgaaaggcccgtttcttggtccgttccttcgttaaggcaacaatttggccggcatcgttaaaacttaaaatcggtttaatccgcaaaagattcccgacaaaggccgcactattcgaaatccggcccgttcgcaagaggtggcttaaatcatccacaacgaaataaacgcccatcgttgctcgtaaagctaccaatttcggcatgatagttgcggcatgttcaccttgggcaactaaccgcgccgcttccaaggccaagaacccttcaccggcactcgtaatcttggaatcaaaaggatacacttcgatgccttcaaccgactgtgcgtaggcggttaggttattgacaaagctcgtaatgccacttgaaagatggatacaaatcacttcatcgtagcccgcttttatcaattgatcaaaaacctgttgcatctgacccattgtaatttgcgaagtcgttggtaatttttcagtagtgcgcattttatcgtaaaatgcttcactcgtgatatcgatattttccaaataagtttgttgtccaaaaataacggtgattggtaccacagtaatattatggtcggcggcaacttgtggatctaaatacgccgcactatcagtcacaattgctgttttcatgtcaggctcctcaataaaactgtttttgtcattatcccaccaatgtggataaagtacaaatgaacaacaaaaaacgccggaccactttctgcccgacgccacagttattaatgagtcattgattcattctcaaatacgacaatggagatgtgcccatcaattaagccactgttattactcaaggttaacatttgattcttttcgttaacgtctaatacttcatgttcatcaaagtagccagctgcataatctttgtagtaaacagcccctagatttgattcaaattcatctggataatctttaatgtcagcatccgctggtactaatagcaatctaaagttcgtatccaacgagcaataaccaacgtttgaaaatggaccaacaccgtcatctaagtccaataaaattttttgacccggtgtcatcttatccttgattttcgcaactgctgcaggtgttatttttaatgccatatcaatcatccctttcatgcttccagtctaccgccgttttaaatttgacacaatctatctgctcagccagtgtgctacaataggcttaaccgtttatttaaggaggtcattatgcttttttatcggtattcatactttagcaatcagaatgatttcgaattctatctcaaactaagtctgtcagtgatcatcgccagtttaatcatcatcttcttcgttcaatatctccgccaccgttcagattcgaagtaccgtgacttactaatcatcttcggcttagttgggattttactcgccggcattcaatatacacggattcaacagcttaacaccgcccactcgcaacaagctcagatggcgcaattcattagaagtgtggcgactgcgcagaaagctagccttaaaaccgtcgcagtcaacacgacttcgcttcagcaaaacatggtagtgcgcgtcggtcatcaaaactaccaagtcatatttgataacaattttactagttatcaactccaaaaagctcagttgattagccaagacatcacctatcaagattaaggagtttactatgccatcttatttcgatattaccattaaattaattttcggtttcttctgtttagtgttacaaatcaacctctctggcaaggggaatttagcccctagcagtgggattgatcaactccaaaattacgttcttggggggattgttggcggtatgatttataatgccgatatctcgctcttacaattcttactcgttttactcatctggaccttaatcgtcttcacaatgaagtttctaaccactcacaatcgctggattaaacgctgggtaattggtaatccacaaacaattatcaccaacggccacattgatattcaaacggcctctaagaatagtttatccgcacaggatctatcgtttaaactccgaattgccgggattagcgatattcgcacggtcagtcgcgcaatcttggaacaaaacggacaattaaccattacgcaaaaaggcgacgccacgattaaatatccgctgattatggacggccagattaattcagaagcacttgaattaatcgatcaaactgaagaatggctcctcgccgacattcaacagcaaggctacagtcttcaacaaatctacatggctaactacttgaaccatgaaatcgtgattacgccctattaaaaaagatgacccgcaaaggtcatcttttttaatgtcgtactctttggagaagcgttgcaaccaaccagacaatcgccccgccaattaaaacaatcgtgcttgtcttcaaaccataatccagaacagccaacccatagtcggtaattgtttgattaaaatcgcccgctttttgagcaatttgttcaacaatgccactatatttaaacgcagccgcccctaatgccaagaataagccactccaagcaaaacttgcaccaacactccctaatacataccggaattgaccacttagtccccattgaactagtacaagaacaattcccataataattgcaacccaagttaagatattgatcacatttctaacaaacaacatctcagtcgctagtggtgctaagtaaggtgcttcaatttggttcgtgaggtattcttgtagtggtggttgaaccgcaaccactgccgttttaattaaagattccgtcaacgcattttcaggcacaactgcttctaaatgagttgcaagctgtcccatcatttgtgctgtgggtaacggcttttcttgtcctgtataaatattatgaacagttttctttaaatcggcctgcacatcagattgagtcagtaatttgacttgtacttcagttggtagcccatttttttgtgccgcatctaataaaacaacgttaattttatcagtcatcgcagctaacgtcttcggttcactgagctgttcttgcgtaaatgattctctcaaaactgtcaggctgagaatcatgccaccaatgccaaggaaaacgcaaagaaagattaagaacgtcaaaaagcgacttaaacctcgatgtggtcgcacgcttggttgattttgattcaaacgactaattggttccattgattaaacaccctttctattcacgaaccctattaaacttcaagactaggattcttaatcattaaatgctaaagtgaacttatcagtcacaggaggccattcaatgttaaaaaatttaacgattctctatatttcaattgctggtaatacacgttcatttgtaacggatttacaggattatgcagcgcaacaacatgctaataacccagcgttaccaaccattaccctcacagaaatttcggatgcgaccccctttaaagcggagaccgaaccgttttacgcgttcgttccaacttacttagatggtggcaacggcattgataatggcgttaaagaattaatgaccaatagcttaggcgaatacatcgattatgcgcagaacgcacgcctttgttatggagtaatcggtagcgggaaccgcaacttcaacgaacaatattgcttaactgctaaacggtatgcggtccaattcgatgcaccgtttatcgccgattatgagctccgtggcaatgcgaaagatgtcgcgcggatttataccttaatggtcgctaacgcgcaacagcatgcctaaaatttaagattagccggtaatgatgtgattaactcgctgggttgttggacaatttggacagcacccgcctttttgagttccgcgattgtgccaaacccataactaacaccaactgcattcatcgcgttttgcttagcgcccaagatatcattttggcgatcacccaccatcagtaatggtgcggtttgtggtgctagaccaagttctgataatgcgtaagtaatgacatccgcttttttgacccgcgttgtctcatcaacacttgctccaaaaacaccgctaaagtaatcacttaactctaaatgatcaatgaccttcttagcgaatggttctggtttcgaagtcgcaattgccagttgtaaatcctgtgcttgcaatgccgctagggtttctcgcatgccaggataaagttgattttcatacaaccctttaggcgcataataggcttgaaagactttaatagcttcttgagtagcagctgcatttaaaccaaactcacgcataattgtttcattgaggggtggcccaatgaatgtgaccagttcagctttggtttgcgtcggcaatgataactcctcaatcatatattccaaggcgttcacgatgccttcttgcgaatcggctatcgttctatccaaatcaaataaaacggtcccctttgtcatatcaatcatctctcgatctcttataaagtaccttcattttagcatactctttgacccttaaactttccttattgcttttttcataaatctataaacctctggtcacaaaatcttcacaaattcccattatagtattgagtatagaaaagcgaatcttttctatttcatactacttaactttttcattttactcctccaaagtaaaattaaggtagacgcaatctaccacgcacgtattattcccccaaagtaatacgtgtaccccttactcctttttagatcttcggatctgctagaaaccagtctccccaaggctggtttttttgtgtccccatcaaaaaagccgccagaacaatttacgttctggcggcttttctcatttttaaagtaggtactgttgcatcagttcaacggttttgagctgggcatcgtctgatactttatgttgcccattttcttccgtcgtcaatgtcactaatgcggtggctgaacttggttgcgcctgaatttcggtcataaaatctgccgtgaattgatatggcaccatcgtatcagcagttccatgatagaaatgcaatggacgacctgccaagtgatcaacgtgcattgataagtcatacgccgctaaccgtgctaaggtatcttcaatcgcatcttgatacttggtttgtaaggccgttggtaattgactaacctgccatttagcaagtgcgacaggcattggtgcgccaatcttatcaacgccaattttgacattcggatatcgggtgagaatcgcatcggttgtaatgccacccatcgaagtccctgtaacaccaatccgttcaggatcaactaagccttcagcactcagtgttgcaaccagttcaccaaactcggtgaccgactgcatcacaatatcccaaaattcaaacattaactcagaaaagagctgactaccatgtcgtttaccatgatacttcgcatctggtaagaccacgcgaaaaccagccttggctaaaaagtgggcgaccattaattctgactctttacggtgcgtccaaccatgatatacaaagacagttggtaataccgctttttcttgaccacttggggccacaatcaacgtactgactgccccaatttgccgttcttcagtgctaatcatctcaaatcctcctcaattgccatttatttcccgggtaatattaaccgaagaatgaacctgtaatcttaaaacggcgtttgatataaatccgcacgccgattaagagtgctgcaattacgatttgaacaagtggtggcaagactggattcaagaaacttggaatcaagattgtcacaccgtatgccgcaacaaaggctagtgttaagccgattacaaccaatgccatcttccaaaatggtggccgttgttcttttggcatttgcgtatagcgcattggataagtcatgatgatccccgcaagcgcagccgtaatgacaattgatgtaatcccaatgctggttgctgaccccttcgttgagaaataagccgcaattccgttaaaggctaggtacataattaaaaagattaagccgttatcaagcatttggagttgaagtgatgtttgcttaggacgttttggcgcgtgcaacaattgatcaatcttggttgtcactggaccatatacttgtgttgcaggcttgcccttatgttgttctgctaccatttctggtaacatttctgccaagatttcagtttggcgttctgctggcacttgttcggcatttaatgcgcgtttgaacttaaataaatagtccgcatttttcttactgagttttgcttctaacccttcaatatcaactggttctggggttactactggttgttcgttcttagccaattgtcttcctcctcaattatcattaaacgttaaatctaaattcgatgatgtcgccatcttcgaccatgtattctttaccttctaaacgtaaacggccagcttctttaacagcttgcattgaaccgtattgatctaaatcagcaaaagaaactgtttctgcccggataaatccgcgttcaaagtcggaatgaatgacaccggcggtttgtggggccttcatgccttgacggaaagtccatgcccgggtttcttttccaccagcggtaaagaatgttgctaagcctagtagatgatatgaagcacgaatcaatttatccaaccctgattcagtcaccccttcggcttccaaaaattcagccttatcggcatcatctaatgaggcgatttcttcttcagttcttgctgagatggcaattacttcggcgccttctttagctgcggacgcttgaatttgtttaacataatccacactatcaggatcagccatggcatcttcagcaatatttgcaacatataaaaccggttttgatgttaataagaagaagcctttaactaacttcgcttcatcttcattaaattcgattgaacgtactgagccgccttcttcaagaacaggcttaatctttttaagcacttcgaattcggctaaggcgtctttgtctttcgtccgcgcaatcttttcaacacgcgcataacgcttcgtaacactttctaaatcagctaagctcaattcaaggttaattgtatcgatgtcgtctaacgggtcaacagttccggtaacagaggtaatattatcgtcgtcaaaggcgcgcacaacatgcacaatcgcatcgacttgacgaatattctccaagaacttgttcccaagcccttcacctttgctagcccctttaacgatcccagcaatatccgtaaattcaaaagtcgttggcacgatctttttagccgggataatttcttgaatccggtctaaacgcttgtcagggacttcaaccatgccgacgttagggtcgattgtggcaaatgggtagttcgccatttcggcgcctgctttcgtgatggcgttaaataacgttgattttccgacgttgggtaatcctacaattcctgcggttaatgacatagttttttacactttcctttactttaaaaattagtttggttgggaccttgttgcatctcttgatagtggggttcatccgcaacaacgacttgtgctgcaggcaccaaattcttcttaagtttcttttcgaattcacggcgcggtaataagacggcgtggccgcaccccatgcacttaattcgaatatccatccccaagcgcaccacttcaaagcgattggtgccacaggcatgttgttttttcatctgaacaagatcgcctaatgtatacatctagctcgactcctcactttaatcgatattcacatctagcaatgcaagaatccggtttaaatcatcgactgtgctgtaatcaatctcaatctttccgcgacccttgctgttaatcgcaatattgaccttggtgtcaaatttatcgaccaattgattttcactcgcttgaatatagggtgatttaatcttggtcttcgtcactttcgcagctttaatctggttcatctggttaattaactgctctagttgtcgcaccgttaagccttcatcaatcgtgcgtttcgctaatgcactaatctgactttttttcttcaatgataataacgtccgcgcctgtcccattgaaaggtcaccattttgtaataacgtcttcacgtcattgggtaaacccaataagcgcaagtaattggcaatgtatgggcggctcttgcccaaccgttctgatacttcagcttgagtcaggtttaactttttcaagagtgtatcgtaagcttgggcttcttctaacggcgttaaatcttcacgttgcaggttttccaagaccgcaatttccatcattgcggattcatcaaactgccgcgtgatggctggtatcgctgttttaccagctaacttagacgcacggaatcggcgttcacccgcaattaattcgtaaccattaatacttttgcgaacaatgattggttggaaaacgcccgacttcttaattgacgctgctaattcagccaaagccgcttcatcaaatgtcttccgcggttgatagggatttggacgaatatcatcaagtgcaatctcttcaactaattcatccgcccggtttttattagggccttcgaacgctgaaaatacagcatccaaaccgcggcccaatccttttccatttctagttgccatgagctgctaacacttcctttgccaaattttggtaaacttcagcgccccgtgattttggatcataatcaatgattgatacgccatgactaggtgcttctgctaagcgcgtattccgtggcacaatcgtgtcgtaaacccgatcaccaaaatacttacgcacttcttcaatcacttgagcccctaaattcgtccgcgcatcatacatcgtcaacaacacgccttcaatcgctaagtttgggttaaaatgtttttgcaccaaacgaacggtgtttaacaattggctcaatccttctaaggcataatattcactttgaactggaatcatgattgaattacttgccgtaaaggcattgattgaaagttgccctaatgaaggtggacagtcaatcaaaacgtaatcataatcggctaagactggttctaaccctaacttcaagcgcatttcacgcgccatctgtgatgttagctcgatctctgcccctgcaagttgaatcgtagctggaacaatgtctaagttcttatgtgatgttttaataattgtttcttttagtgggaattcatcgaccaacacatcatagatatctttttcgacttgggatttttgaaccccaatcccgcttgtcgcattcccttgtgcatctgaatcaatgattaacacgtgattgccagcatccgccaaacaagcgcctagattaatcgtggtcgttgttttaccaacgccacctttttgatttgcaattgaaataacgtgtgccataatgagcctcccttattgctttggaatttcgatcgtaatccgataaacatcatcttgttcttcttcggtggctttgacggcaatcccgctttgttcaaccatttgaaccgactttttgatggtgttgacggcaatgcgtgtatcatgggcaattgctttttttgctttatcgttcgctttttttgccttcgtggtagcttcttttaaactgtcatcggttgcatcaactgtctcttcagttgattctggttcaggattcaacgtcttgttaaccagcgcttccgtatccttaaccgttaattgttcagccaagatttggtgtaaaatcatttgttgcttgaattcatccaaccgtaaaaggctccgaccgtgtcgttcagaaatttcatgattcatgatggcttcttgaacgggttgtgagagtttcaatagccgcaacttattagcaacaaaagattggctcttacccatcttttctgccaagctggcttgtgtgaagtcgttcagcttcattaagtccttataagcttgtgcttcttcaacggcggttaattcttcgcgttgtaagttttcaatcaaggccattgaagctgtttcgtgatcatccatagtttgaacaatcgctggtaattcagcccatttgagggtttgaatcgctctaaaacggcgttcacccgcaataatttcatatttttgatcttcatattcacgtaagataatcggttgcaataagccgtgttgttcgattgtgcttgctaattcggcgatattgtccgcattaaatacttttcgtggttggaaccggttaggcacaattgctgaaaccggcactttgatcacttgattaatacttttatcgtcttttttcttattaaaaaatgagagtgccattatttttcctccttagccattaacggttttttaactggcacaccagcccgccgtggatacttggcaggtgtcggtacaaccttatcaattacgattagatgtcgttgatcatctgtttctggtagcgtcaaagcaatgtcttgtgcaaattggccaccaagtgtttcgattgcatagttggcttctgccaattccgtttcaccttgactcgcttttaatgcgataaactgcccaccaactttaacagttggtaaacagaattctaccagtacatttaatgaagcaacggcccgggcagtcacaatatcaaactgttcacgatatggactcttcgggttgctgaacagttctgctcgatcatggaccaatgtcacatcagacaagcctaattcacggaccaattcttctaagaagtgaatccgcttgtttaatgaatcaacaatcgtaatcttcaattgcgggaataaaattttgattggtaacgatggaaaacccgcgcccgcaccaatatcgcagatcgtaaggggttcagtgcgtagtttttcaagatacaaagttggtgtgacagaatcgaagaagtgcttgagataaactgcttcttgttctgtaatggctgtcaaattaacttgttggttcacttgtacaagccgtttgaaatacaattcaaactgatccatttgtgcttgtgaaacttgaatattgtatgtttttaacgtcgctgcaaaacccgctggtgtcattatttctccttaactatgctttaaagtaggcgtttaattcgtggaacattattgtttcacatataccttttagtttaacgtacttaccctaaaaaaacaagattcttcccagttttcagattatcgtttcatgtgaaacataataatcggtaatttaagaacaattatcgcctttttcaagcgaatcattcagtaagaaagcacttttgtcatcgaacagttggtgtgcatcatcacaaaggcgaactatcgcgattatttaagaatgttatattcgttttttacttaatttctaattgaagtcactattggcgtgtgctaaactaaatgttaactaaattttaacgattatcttggagggacactcgtggcagatatacactcaaattcagcacagccaattaatccaaatgaaaagcttccccacattaaagcagcgattctcggcttacaacatcttctagcaatgtattctggcgatgttttaattccattacttgtcggggctgcattacattttaataccgctcaaatgacttacctcgtttcagtcgatattttcatgtgcggggttgcgaccctattacaattaaaacgaaccccactgaccgggattgcattaccggttgtcctaggttgtgctgttgagtacgttggcccgttagccgccatcggcactaacagccaactcggaattgacgttatgtacggtagtattattggcgccggaattttcatcttgttagtttctggcttgtttgcacgtttgcgttggctcttcccaccagttgtcacagggtctctcattacattaatcggattcacattgattcccgttgctttccaaaacttaggcggtggcgatgttgctgctaagtcgtttgggagtacaccaaacttaattaccggtttttcaacgattgccctaatcctgatttttagtatctgggggcgtggcttcatccaacaaatcgccattttaattgggattattgctgggaccttaatcgcagctgcgattgggattgtgtccttagatccagtaggtcaagcaagttggttcaaattacctgaattattctacttcggaacacctcgttttgaatggtcatcaattgtttcaatgtcattggctgcgttaacgaccatgattgaatcaatcggtgtcttcttcgcccttggtgaaatcgttgggcgcgacattactagcaatgatcttaagcggggcttccgcgctgaagggattgccgctatcttagggggattgttcaacaccttcccttactcaacgttctcacaaaatgttgggattgttcaattatccggtatcaaaacgaaaaaaccagtttactactcagcattcttcttaatcatcttaggattattacctaagattggggccgttgcaaccattattccaagcgctgttttagggggcgcgatggtcgttatgttcggcactgttgggattcaaggcattaagatgttacacaaagtcgatcttgatgataaccgcaacttactagtcgctgccgtttcaatcgccttaggcttaggggtagcaattcatccaaccttgctccaatcactaccaacgagtgttcgcacaattctaggcaacggcttagtagtcggcagtctcagcgctgtcatcttaaacttactattcaactatcgttcattaattgcagcaaaacatgctgaacaaaaataaatcaaaaaaagtgcctacaaatttaaccgtttgtgggcactttttttgtctattcaatttcagttgtccgaatacttctagcaagtctatttgtcatttcaaacagctacattaattctggcatgctaattttcttatctgattcagtaatacttttaatgtaagtttcacacgcctgctcaaatcgacgataaattgattctccagcgggagaaactgctatatcaacaattcgacgatcatcctgtttgccatattgtttgctgatatacccctgatcctctaatttacgtaatttatttgaagatgctgcggtagatgtttttaatacttgtgcaatcttactattattaatacctttatagcgttttaatgtttgtaaaatacgaatttgttcgatggtaactccgtcttcatttaaaacttgactaatgtttgctgaaatttgagccatctcatgatagaaattaatcaactctaatttatcagtcgattgcgctatagaattcatcattcctcctccgtttcattcataatcctttgataaaactggtgccatcggctaaaatactgttgcaatgagaaacagtcgttaatcgtttgccgggcatttcgtgaatatgtttcacgtcgcatctgactacctagaaaatcactgagttgttgaactaagccagcgtcatctcctggtgtcaccaaatccccgttcacatgattctcaattacttgtggaatgtccccgacattcgtagctaaattgggaattccataagccatcgtttctaaaattgccattggtaagccttcttgatatgtgggcaataggtgtaacaggctttcttgaataacggtattgcgatccgccaaagctaaccagccaccaaggcgcacattggttaactttaggcggtctatttcttgctggaccttcccctgttcaccatcaccatacaacgtaaattgaatatccggaaaacgggattgaatcacccctgctaattttagaatatcgtaggtgcccttacgttcgcctaagcgccccagtgtgataatttgtttagactgactatggtatttgtattgcttaggtagttcaaccgcattagcaataatcgtaatcggtgtttgcgtaagtgtttggtaaaaagttgcccattcagtgcttaacacaacaatgccatccatagccacggaaaacaatgttaatattaattgaaattcactatagattcgcattatattaactatttttggatataaataaacttttaaatatctttagaatattctcataaaactaaagtaacgatgttatcattctatttctccctcccattattgtcatctaattaacgaatatcagttaatatgcccatcaaaaaaaccatcataattaaagtttttactttaattatgatggtttttttaagtatttcatttacgataatattcactatttattaaaaatagtcattactattggtccgcatacgaaattgatgagaacttattaaacgttttgacaaataataatttgactgtccctcgtgcacccgcacggtttttttcgataatcacttcaacttctccaacgtccgcatcatctgactgctgtggcgctggtgctggcggattgccaccaccgaaatcatcgccatcttccctaggttcatcgcgatagtaatcatcacgatataagaaagcaacgatatcagcatcttgttcgattgatcctgattcacgaatatctgaaaggactgggcgtttatcttgtcgttgttcaaccccacgagagagttgagagagcgcaatgaccggtacccgtaattctttagccaatttctttaattgacgtgaaatcgccgagacttcttgttgccggttttcttggccggaaccttcaattagttgcaagtaatcaatgacgattaagccaacgccccctttttccttcgctaagcgccgacatttcgcccgaatttccgccattttcacgccgggcgtatcatcaatatagatattcgcttttgaaaggctccccatggctacgattagattctgccattcaagttcgtcgagttgcccggttcttagatggttggcgtcaatacttccttctgcacacaacatccggttaacgagttgttcagcacccatttccaaactaaaaattgcaatattctcattggttttcgtcccgatattctgagcaatgtttaagacaaacgcggttttccccaccccgggccgggccgctaaaataatgagttcatcttcatgcaaacccgcagtaatcttatctaaatcgcggtatcccgttgatagacccgtaatgtcttcttcattttgatataacttatcaatttgttcaattgaactcgttaagacatctgaaattgatttgaacccggccttattttgccgttcggaaacatccatgatttccttttcagcggtatctaaaatatccgtgacgtcttcatcttgcgcgtaaccctttgccacaatattttgagcggtttggattaaacggcgcagcattgctttttcagagacaatcttggcataataaactacgttggctgccgttggtacagcctcagccaactcagctaaataaccaataccaccgatatcttccaattggttctgcgcatcgagggcactctttaaagtcaccgcatcgattccttcaccccgttcgtttaattcaaccatcgtctcgaagatcaaacggtgggctttacgataaaaatcgtcggcagtaacgtattccattgcttcaacgagcgcatcgccactaataaagacggcccctaaaacggcctgttccgcctcattattctgcggcggtacttgttcaattagttcattattcaccatttttactcctttggttaatcgacttcaattactcactagtttactcaaaataccagtgactggcaacagtcaccgattggtcagcaataaaaaaagccgtgatagtggtgctaatcacggtcttttcaatcattcattttattattcggttacgatatgcacacgaatcgtagctgttacatcagggtgaatccgtacatcaacattccggtaacccaacgctttgattggttctggtaaatcaattttccgtttatcaacattgatctgatattgttgagccaatgcttgggcaatttgcttgcttggaattgaaccaaataagcggctgtcttcgcccgctttagatttgatttcaacgattgttttatcgtcttcaattttggcttttaaaacctttgcttccgctaattcagcagctgcatttttagcttcagcatgttgttggccttttaaagcactgatagcagctgatgttgcgggttttgctttcccatttttaattaaaaagttttgtgcgtaaccatctggcacatctttcacttggccttttttacctttaccgcgtacatcttctaagaaaataactttcattgttctgaccaccttatctaattaatcgtttgttgcttccttgtccgtttccggatcaaatagctctgccaaaaccgttaataacttcgccttggcttcggaaacagtcgtatctgccatctgcgttgccgcattggaaagatgaccaccgccacctaatttctccataatcacttgcacattcacatcacctagactccgcgctgaaatggcaatcatgccatctgggcgtttcacaatgacaaacgaggcttcaatgtctgacaatgacagcaaggtatccgctgcttgtgctgcgatgaccggatcgtaggtacggttgtcctcacccatacataatgccatatttggctcaaccatttcaatggtttcaattaaatgattcttttgaatataattatcgacattttcttttaacaagtgttgaaccatcgaagcatcagccccaactgaacgtaaataactagctgcgtcaaacgttcgcgtcccagttcgcattgaaaatgactgcgtatcaaccgtaatcccagccaacatcgttgtggcttcgaacttgttaatattagcgacattttgtggttgatactcaaacatttccgtcactaactcacacgttgaagaggcgtagggctcgatataaaccaacattgggttttctgggaactcttccccacgacgatggtgatcgatgacaatcgtccgctgagcaagcttctcgtacaacttaggcgccattgttatggatggtttagaatgatcgaccatcactaataaactattggccgttgctttttcgagcgcttcttcaggcgacaacacttccactgcaatttcagggtaggctttaacttcctctaaaagacgttgaatatctgtatgaatattgttttggtcaacgaccacgtagcacttcttaccgttcatctcggcaatccggcgaatcccaaatgaggcgcccaatgcatccatatctggccgaatatggcccataacaaagacttcgtcaacttgtttgaagatttcttgtaaggcttgtgaaatcatccgtgcacgaacccgcgtccgtttttccatcggattagtcttaccaccataaaaacgtgcttgtccttcactcgctttgacaacgacttggtcaccaccacgaccgagggcaagatccaaattgctctgtgaagttgttgctagaacggctaaatcggattccccataagcaaacccaacactcaacgttagtgggaagttttgtttggatgtttcttctcgaatttcatctaaaatcttaaacttctcttgttcagcggcgtgtaatgatttggcgtacgccaaaacaaagaaatgatcatcatcaactcgcttcaagaacatctgaaattgattcgcccagcgtgataactcgttggtgacatagttattcagattagaaacagattgatcatccattgtctgagtgatttcatcataattatctaagaacacttgcccgatggctacttgctcatcttcataacgatcttcaatggccgcatagcgtgtaatatcgagaagataaaccaccccaatgctttcttggataatgatttggaattgattatcgccccaacgaacaatttttgtttcattagcatcttcattttgtgcgactaattctgccaactctggatcgacagacttaatctttttgcctaaaacttctttattaccgaaatattgctgtaaataaggattcgtccattgaatctcacctgattcgttgtacaataaaatcccaattggcatcttaattaaagcctcttgctcgccgcgcttaatgcggtacgacaagtccgagacatacttggctgtattctcagtgaccgtttcgatcgcgtatagcacagtaatgaccgtcccgattagcagcacgaataaaattagagcaattagccaatctaacatcgcagcaaataccaaactaaccgctgtaaggcccaacaaaatcagggcaacggtccgcaggcgagtatcatctaaaaactgtggtaattttaattgtttaaacttatttttcatgtaaactccttaattctagatcccattctgattcttgttcatctatcattgagtctatgtggttctttactaaaacttaaaaaatactacttttattttagcacaattgccctacaattaccgctttgaacccgtaatttaatcccatgttcccctattaaagcgcacaaaaaaagacctgctaaacagtgtttagcaggtcttttggttgactgattagtcttctgtaacgaatggtaataagcccataatccgtgcgcgtttgattgcaattgtcaaacgacgttggtttttagcacttgtaccagatacccgacgaggtaaaatcttaccgcgttctgagataaaacgtttcaataaatcagtgtctttgtagtcgatatattcgatgtggttagcagcgatgaaatcaaccttacgacgacgacggttgccgcctcttctttgttgagccattgaaagttcctccttccaaaacagtttattttagaaaggtaaatcatcatctgaaatatcaattgcttgaccattatttgcaaatggatcggcttgagtgttatttgcagctgatggattacccgattgttgagggctggtaaatccagattgttggctaccattgctttgattgttgttaaagttttggcttgcgccatccccttgccgttgctccgttgttgtccgtgattctaacaatgagaagttatcaacgaccacttcggttacgtatacacgttgaccttgttggttttcataatttctcgtttgtagacggccatcaactccgactagtgagcctttcttagtgaaattagcgaaattttccgctgatttacgccagatgacacagttgataaagtctgcttcacgatcaccattggcattcgtgaattgacggttcactgcgattgagaaagtcccaacagcagcaccactagaagtgtaacgtaagtcaacatcgcgtgttagccgaccaacgagtacaactcgattaatcattctgtcagctcccctctattcaataattacaattcaaaattagtcttcgcgtttaacgatcatatggcgtaatactgagccatcaatcttagctagacgatcaaattcgtttaaagcttcatcattatcagctaaaacatttacgatatggtaaatgccttcgtgttgattgttgatttcataagctaaacgacgttttgaccagtcttttgaatcaatcacttcagcgccgttgtcttttaagatgccgtcgtaacggttgacaagagctgttttactttcttcatcaagtgttgttgagatgatgtaagtaacttcgtattttgattgagccatgactgttcacctccttatggactttaggttcttacctgtgtaagaacaaggagtaactgactaataaaaattagcctcacgatttagaccctgtgtctaaatcacagatactcacaagataaaattctatcataacggccgttaaaatacaatctaaaataaaaattgttgctgctaacacgcttggtaacagttgttacaagtgtatttacgcagaaacgatttttatttttttaatttaattaattttctgaatcttgatcatctgatgccgattgatcggcttcagcccgcgcgagtaattcatcgacttgtgctaagccagtatcagtagtgtcatcagttggtgctattggtgccgtcgttgcttctggtgtttcaggttcatctggttcagcttcgactttcgccattgttgcgaccttcgcttcgtcatccacccggattaaacgcacaccaagtgtggcccggccagtttgtgaaacgttagcgaccttgaaacgaatcaagacgccagtatcagtgattaagagaatatcctcttctccagtgacggcagcaatcccagctaatgggccgttcttttcagtgatgttggcagtcttaatccctttcccaccacgacccttgattgggtaatctgcaaccggtgtccgtttgccgtaccctttttcagagataacaaggatttcttgacccggaatcagtaagtcagagccaaccacatagtcgccttcacgtaaccgaatcccacgcacaccagcagcggttctccccatcgaacggacagctgtctcactaaatgacacagcataaccattatgggtcccgataaagatattttgttgcccatcagtcatcaagacgttacttaattcatcctcttcccgcaaggtcaatgctttcaacccattgctacggatattggcgaattcagaaacggatgtccgtttgaccgtccctaagcgggtaataaagaagagtgattgttcgtcttgcacttctttaccaacattaaccacggtctgaacgcgttcatcagaattaatgcctaataagttaatgattggaattcccttagcagtccgcccatattctggaatttcataccctttggcacggtaaactttcccagtattggtgaagaataagagcacttcatgagtcgaagtcgaaagcaagtgttcgatgaagtcgtcatcatggacgcccatcccttgaatcccacgaccaccacgattttgaactttgaattcgctggctggtaatcgtttaatgtagccgttatgcgttaatgcaatcacaacgtcttcttcttcgattaagtcttcgtcttcaagactaagcacttcacccaccaataattctgtccggcgtttgtcaccgaatttactttggagttcaagcaattcatcgtagataatcttcttaatgcgttctggtttggctaaaatatctttcaaatcagcaattaaagtcatcaaattattgtattcattttcgactttatcacgttccaaaccggttaatcgaactaaacgcatatccaagatggcttgcgcttgtttatccgataaatcataacgatccatcaacaagaccttagcggcatcacctgtattcgaaccacgaatgatctgaataatcgcatcgatatggtctaaagcaatgcgtaacccagctaaaatgtgcgcccgcgcttcggccttcttcaaatcaaattcagtccgccgacgaatgacttcttcttggtgcactaagtagtgttccaagattgatttcaaactcaagactttaggggcaccattcacgatggccaccatattaaatgagaatgaggtttgtaatggtgtcaatttgtacaggttattcaagacaactgaagcactcatatcccgacgcacatcgattacgatgcgcatcccatcacgatcagattcatcgtttaaatcggtaatcccttcaagccgtttgtcacgggctaattcagcaatccgttcgaccaacttggccttattaaccatgtatggaatttcagtgacaataatccgttctttgccgttcttttggacctcaacgtccactttagcgcgaagggtgattgtccctttaccagattcatacgcatggcgaataccagatttacccatcactaacccaccagttggaaaatcagggccaggtaaggcatccatcaaatcagcggttgtcgcatctggattatccatcaagatgtgtaatgcgctaatcacttcggctaaattatgcggtggaatattggttgtcatcccaacggcaatcccagtcgccccgttgacgagtaggttcgggaaacgggctggtaaaacagcgggttcgcgttctgactcatcataattcggtacataatcaattgtattcttattgatatcacgtaacatttcgacagccatcttgctcatccgagcttcggtgtaccgcattgcggcagcaccatcaccatcgacagagccgaaattcccatgaccatccactaacatgtaacgataactaaaatcttgtgccatccgcaccattgcttcataaatcgctgaatcaccatgtggatggtacttccccataacatccccaacaattctggcagatttcttgtaaggcttttcgggagtgacccctaattcattcattccgtataaaattcgacgttgaacaggttttaacccatcacgaacgtctggtaaggcacgcgcaacaatgacactcattgcatattccaggaatgatttacgcattgtcttagataaattgacgttttcaatccgaccgtcttggccaatttcgtttgccattaatctataaacccctctcagtcagtctttcaatgtgtccgtttaagcggcgaacacgctatgcatcgatgctctttggatccatgtaaacggcattttcttcaatgaaaatccgacgaggttcaacccgatcgcccattaacatttcaaaaatttgatccgcttcttcggcatcttcaacgttaacccgcaacatgcgccggttttcaggatccatggttgtttcccataattggctagcatccatttcccctaaccctttgtaacgttgcacttcaggtttaggacttggttggagcgtccctaacacttcttgtaattcttcatcagaatcaatatagcgcatcatcttcccttgtttaacacggtacaaaggtggttgtgcgatatacacgtaacccgcttcgacgattggtcgcatgtaacggtagaacaacgttaaaagcaacgtccgaatatgcgcaccatcgacatcggcatcggtcatgatgatcaacttatgataacgggctttagccacatcgaatccttggccaaaaccagtgcccattgctgtaaataaggtccggatttcatcattcgccaaaattttttccatgctagctttttcaacattcaggattttcccccgaattggcaagatggcttgcgttaaacgtgaacggcctgattttgctgaacccccagcggaatccccttcgacgatgaataattctgaaatagcaggatctttactactattatcggccaacttacctggcaagtttgagatttcaagaccgttcttcttccgtgtcacttcacgagcgcgtttagcagctaaccgggctttggcagccaatgagcctttgtcgacaatttggcgggcaatcgatgggttttccatcaagaacttcgtgaaatgatcagagaacatccgatcagtcaccgtccgtgcgtcggcattgcctaatttcgtcttcgtttgaccttcaaattgaggatccggatgtttaaccgagacaaccgctgttaagccttcacgcacatcttccccagaaaggttcgtgtcgttggcttttaagatgttttgcttggttgcgtagtcattaataacccgcgtgagcgccgtcttaaagccagattcatgagtcccaccttcgtaggtatgaatgttattggcaaaggtcatcaagttcgtccgataatcattcgtatattgcaaagcaacttccacggtaatcccgttttgttcaccttcaacatagattggttcgtctaaaagggtctcttttttgtcgtctaaatattcaacgtaactcttaatcccaccttcatagtggaattcaagtttttcatgtgtttcagcccgtttgtcggtgaacgttaacttcaagcctttgtttaagaaggccaattcccgaatccgcgttgttaaaattttatcatcatacaccgttgtttcagtaaagatatcagcatcagggacaaaatgaactttcgtaccatgttcatgggctggtgcgtcaccaatcatcttcattggcgtttgcactttcccccgcttgaaatcgatgtagtagcgtttaccgccttgagtaacaaccgcatctaattccgttgacaaggcattaacgaccgaagccccaacaccatgcaacccaccagatactttgtatccgccgccgccgaattttccaccggcatgcaagattgtaaagacggtttcgagcgcagacttaccagtcttagcttgaatcccaactggaatcccacgcccatcatctgtaactgtaatactattatcgggttcaacaaccacgttgatttctgttgcaaaaccagcgagtgcttcatcaatcccattatcaataatttcccaaaccaaatgatgcaacccttgggaactcgttgtcccaatgtacatccctggtcgtttacgaacggcttctaggccttctaacacctgaatttgactggcatcataagatttagcgcgttcttcttttgcttccatttgtgcttctgtctcttgattcatttgatcatctgccaagaaaaaaacctccgtttgatcgttttttgactaatttgctgctgcatcggccactgtcacggtgccgtttgtcacggtaaacacccgtggcgcactaataatttcttttttgacattttcaagactagttgtcgttaagaacgtctgcaccttattctggaacgttttcaataagtgtgtttggcgtaaatcgtcaagctcggacaacacatcgtccagtaataggacgggatattcaccggtttgttccttcattaggtcaatttccgccaatttaacacttaacgcggttgtgcgctgttggccttgagagccaaacgattgcacgtccttaccgttaaccaaaaataacacgtcgtcgcggtgcgggccaaccaatgtcgtgccctgttcgacttcccgtgtttggtgcgactcgtatagggtttgaaactgttggtataaaccttcggcatcaagtaccaactgctcatctggaatctgactttggtatttaaacgtcaaaacttcccgctctttggtaatctcttgatgcaacttctgcgcccacttctccatctgttgcagaaattcacggcgagcaaccgtgacttccgcgccataagcggctaactggtcggacaatacgcctaaatacactaaatctttagcttgacgtcgttgtagttgcttcaaatactgattccgctgtttcaaaatcgacttgtattgcgaaatgttatacaggtacttcgcactcatttgaccgaattccatatcgataaagcgtcgtcggacagctggcgagcctttcacgatattcaaatcctccggtgcaaacaagacgacattcaattgaccgatatattgggataacttagcctgttctaaatgattgaccttcgcttttttacctttttgactgaccaccaattctaatggtgtgtggccagtttgccgttgtaccaagccggtaatctttgcgaattcgccatcccattgtatcagttcacgatcattattcgtccgatgcgaacgagccaaagccaacacatagatggcttctagcaagttcgttttgccctgcgcattttcaccaatcaagacattgatatctggcgagaaatggacgtccacttgctcgtaattccgataatgatcaagttggagttcacttaaatacatagtcgcctacaatctttcttgttgtttaatgacaaactggccgttatcgggcacctcaacgacgtcttccagatataacttccggccgcgacgatcatcaggttctccgttcactaaaaccgttgtttcttttaaaaaccattttgcttgcccacctgtttcaatcacaccggcctctttaaggagttgcccgagtgtcacaaactcagcttcaagtttaatttcttgtgccatactcaacccaccattcttaacgatattaattactgcgctaataccgatctgttataccttacaattatagactttttttgccttaaaaacaaataaacacagctaaaatgctttctgagcgtttttaagtgctttaaccttatcctacttgttttatccgaaatcgctgtaaacgaatttattttaattttagcgcaaaaaaaaacgccccatttttaaatgcggcgttttttgattattaaaatgtccgaactggtgtgattaattgaatgtagtgttcttgatcttcacttgggaccaatgtaaatggccgtaaagctgccgtaaagttaatcacgatggttgtttgaccaaatgaacgtaaagcatccttcatataatctgggttaaatgaaatttcgagatcttcgcccgttaggttttcaaattgaagggcttcttcaacattcccaacgtccggtgagttcccgtagatgattgccgtgttgtccgttgtattcaatgtcaaccggacaacattgttccgactttcatgagacaacaatgatgcccgttcaatcgcagctaataagaccggtgcattgaattcgatttgtgtacttgaagaagttggaattaaacgtgctgtgtcagggtaatttccttctaacaaccgagaataaaaggctaagttaccggctttaaagagcacttggttttcagcaatccgaatttcaacggtttcaacttcgtctgctaacgttcttgaaagttcaattaaactcttcccaggaataatgacatcgtagttcccatcacttggtactgaaacggttaattttcgttgtgcaagtcgatgactgtccgttgcgacggctaacatttcgccatcttttaaaaccaaatgaacccccgttaagattgggcgactttcttggttagaaacagcgatgacggtttgatgaattaattgtttaagcacatcagtactgatactgaacggattttgtcccgcaatttcaggtagatgtggataactattagcatctaagccattaattgtaaattctgatttacctgaacgaatggttgtttggaagttgtcaccaacagcaatcgtcatttgatcttcaggtaattttttaacgatttcactaaagaagcgggctggtaaaacaatggcacctgcttcttcaacgactaattgattcttttcatcattactagcaagggttgcttcaattgaaatatcagcatcactaccggttaaggttaagccttcttgcgaaagcactaatttaagccccgtcaaaataggaatcgttgttttagctgaaatggcacgttgaacatcattaagggttttgatgaacacgttgcggttaattgagaatttcatggatgttaaacctccgaaggaaaatagatatatatattataaaagaattttaagtaatagtagtagggcctgtggaacctgtggataacatagaaaagcaaaagagtgtctagttttccacttgtggataagttgagaacaactcttaggataactttagcgtttatccacagcctatatttagccttttaaggtattcttcaaatctaagatggcatcttttagattttgatcactcgttaaagcttggctaattcgttcatgagcgtgcataactgttgtatgatctttaccgccaaattcttgtccaattttgggaagagaactgtcggtcatttcgcgggccaagtacatagcgatttgccgtgggagcacaatttctttaacgcgcttgcgcccttttaaatcagtgattgaaaggctgtagtacttagcgactacggattgaatcttagcaattgaaagttgactcgacttcccattgagtttcaagcctttaagggcatcggcggcaagactagttgtaatttcagcattttgcatggttgcataagcttgaacccgaaccagtgaaccttcaagttcacggacgttggaatcaatttgaccagcgatgtagctcaaagtatcttctgggatttcgaggcgttctgtgtcggctttgttccgtaaaatagcaattcgagtttccagatcaggcggcgtaatgtcgacggacaagccccatttaaaccgtgaaactaagcgttcttggagcttaggaatttcattaggtaaacgatcagatgttaagacaatttgctttttatcattgtagagatcattgaaggtatggaaaaactcttcctgagtcccttctttatccgcaaaaaattgaatatcatcgaccaataataaatcaacgtttcggtattcttggcggaatttttcttgattcttcgtttgaatcgaattgatgaagtcgttggcaaaagcttcactcgtcacatacttgacgtttgtgtcaggtttagagagtaacagctggtgaccgatagcttgcatcaaatgggttttacctaaaccaactccaccgtataaaaaaagtggattatataaaacaccgggttcttctgaaacaacgagtgctgcagcgtgggccatctgattgcctttcccagtcacaaacgtgtcgaacgtgtatttactatttaaatgcgtttcacgtaaaaaggttggggtttcagctttggtgaggctgcgttcttcagctggtttttcagcttgaagctgctcggcttcggtaggtaacagaaaaataggggtcaattcaatctctgcgaattcgtaggccccttcaacgaccttagtggccaagttactttcccaatactctttgtgtaaaggagaaggcacttcgatcagtatttcattggctctaaaagcaagcggtttggcggttttaatccaagcattaaaaccgacgggtgttaaatcattttggaattcttcccgcaaatagttccaaagttcctgaagatcaggcatgtagcgtgtcctcctcacgtaaaataaccactttattgaaaaaaagttcaataaagaaagactatctacattctagcattctaaaaaaaagttttccacaacaagaacaaaatccacaggaatgaattaaaaagttatccacttgaacacacgaccggggataacttttagtggggactgtggaaaacagaaaacaacaaacgattatcgcacttatccacaaaaaagtgtgtgtatctgatgcttgctattaaaaggttttatcaatttgtgcacagcttgaaaatagcttgtggataacatagtaacaccctgtgattttctggataaatcagcaagtaatctgtgcgtgacaaaaatcggacgattcggtataatcagttatccacaagaaagccaatgaattattttttgtggataagaatatttattctgtttttttatggaaagtgttttaacttctatagaaatatgctattatattttagtgaatgtcgtaggtggtatttatcacccgttgtttctcagatatgaaaacaatagacacagtcaattaggaggtgccagtataatgactacaaagagaactttccaaccaaagaaacgccataaagaacgtgttcatggtttcatgaaacgtatgaatactaagaacggtcgcaaggtacttgcaagacgccgtgctaaaggcagaaaagtattatctgcataggccactgatgcttcagtggttttttttattatcctcaattaattaaatgaaatgccggagtgaattatgagaaagtcgtaccgcgtcaaaaaagaacaggatttccaaacggtttttgaagcaggtcattcagttgccaaccgcaattttgtggtttatcaattagaaaaacctggtcaaaagcattttcgggtgggcctgtccgtaggtaaaaaagtgggtaacgcagtgatgcgtaatcaggttaagcgttacattcgccagagcttgttggagttgaagccagagttaccacagactgtcgactttttagtgatcgcaagacgtggcgctaaccaactaacaatggcggaaaccaaacagaatttaatgcacgtcttaaaactagcaaagctattaaaggaagaagcagattctgcttctgaataagtgagggattacagtgagttcaaaaaatcgcaaacggctattattagtggccagtctattcttgttcatgctaatcgcagcggggtgtagtacatcaccagttgatagtagcagtactggcttctgggatcattatgttatttataacttttcccgctttattttatggttagcagacatctttggtggcagttatggttgggcaattgtggccttcaccatcatcattcgggtgattatcttgccattaacttggtggcaaagtaagagcatgctcaaacaacaagaagttgcaccagaaattcaagcacttcaaaagaaatatgcttctaaagatgctgagacacaacagaagttacgcgaagaaacgcaaaagctatatgctgaagcgggcgtcaatccagttgtgggctgtttaccactagtggttcaaatgccagtgttgattgccttgtaccaagcaatctatcgaacagctgctttaaagagtgggacgttcttatggatgcaacttgggaaagctgatccttactttattatggctatcttggctgcgatctttacatttgcaacatcgtatctaacaatgatgtcgcaacccacgaagaatgctgcgtcatccgcaatgttgtgggtgatgccaatcatgatttttgtgatggccatgaacatcgcgtctgctgtttcaatttactgggtggtaacgaacgccttttcagtgggtcaaacaatggtgattcaaaatccatttaagattcgccgcgaacgcgaagccaaggaaaaagaaaagcgtgatcgtgaaaaagcacttgctaaagcacgtaagaaagcaactaagaaacgttaatttccaaaattaaaagaccaatcataatgaattttcattatgattggtcttttttagaataggtaataggcagcaagtacaagaggaattgcgatagcgcagacgacacaaacggcaccaataagtaacccgcttttatggcggttaatcgttgtttttctcagcaagaatcgggatccaaaaaaataacagaatggtaaaaggatgaggggaacattctgagccaccccttcgacaggtggaaaggttagcattaaataatctaatagcaaataaaggagtgttgttaatataaaaagaaatagtttcaatggctaatcctccatagcgctagattaaaaaatagaaattcagatagataaattgttaaaattggttctaaaccgttttcttaattttatagtagcatcatgattggtaataatcgataactaatttcaagactaataatcattcaaaaatctttaagaataaaaaaatcgtaaccgatttggttacgattttttgctgtttaatagtctaattgtttcaaatgaaggaggaagtgctgatcatcaatcggttttagatgataaagcactagaattttacgcgttaactttggttcaatcggtgcagcatcgtcaaacatatggaagtgatcgaaaaaggctgtattgacttgttcgattaacgttaaaatgccggcactccctaaatcgaacccaagatggtcggtgtctgataattgactcgccttaatatgggttaagtattggatcagttcgggtcccattgccataattttatcgggcacttgggtcgtttttaacagtgtttttaaatctgcgattgtattagcgggtacttgttcaatcgtcatcataaacatcgcctttctagcagctatgtatctgcttacattcctaatttaacagatattatcaaaatgtctagtggatctggttgaattaatcgcgctttgcgcgaaatttcgctataataagtgcaatcgtttaaaagtggaggataaagagatgacctattcagaacaatgggatttagaaccgatttttgccggggggattgattcaccagcgttgacgcaacgattggcggatttgactgcacaaatgacgcccttattagaagcggtccagaactggacgtttgcgacagatcagccaacatttgcaacgctaacgcaaatcactgaacagttacaagcgattgaagcgggtctcaagcaaacggagagtttcgtgaatatgattcaatcaacggatgaacgcaatccgcaagttgcaccgatgatggggcggattaatgcgcttgaaaatgatgcgaatcagattgatgtcgcactcacaaaaaaattggtcgcaatgtcagacgcagattttaaaaccgttgtatcgacacctgccttacaagcgattcagtttaatctaaccgaaaaacggacgaatggtgctgaacttttggatgaagcgacggaaaaactaattaaccagttcgcgttagatggtttaactggatggagtgatcattacgactcattggttgctgaaattcaagtccccgatggtgagacgactttatcggcgggacaagcgcagaataaatttgaatctgatccagatcccaaggtacgccaacgcgtctttcaaaattggtaccagacttgggatcggtattcaccattattaacggatacgttaaatcatttggctggcttccgcctaacggattatcaagcacatggcacaacggactttttgaaaaagccattggcaacgagtcgcatgcaacccgcaacgttagaagcgatgtggtcgatcgttagtcaaaataaagcgccgcttgtcgattttctaaatcggaaggcagcgttaatgggcaaagaacagcttgcttggtatgatacctgggcaccagtggttgtaggtgattttcaaccgcagcgttattcttatgatgaagcagcggattttatcatgcagaactttaaagcgttcagtcccaagatggcttcggtggcacaaaccgcgtttgaaaagcgttggattgaagctgaagatcggccaggcaaacaaccaggtggttatatgactgatttacctgaaacggatgattttcggatttttatgacatttgatggcacccccaatggtgttgcaactttggcacatgaattagggcatgggttccatacaatgatgattaatgatttaccaagttggcgacaagactatgcgatgaacgtcgcggaaacagcttccacttttgctgaactaatcgtcagtgatgcgactgttaaagcagcgcaaagcccagcagcgaagattaatttattggatcagaaaattactaacgcaattgatatgtttatgaatattcacgcacggtttttattcgagcgacatttttatacagcgcgccaaaatggcctgcaaacaacagctgatttaaaagcactcatgctagccgctcaaaaagaagcctatgcggatgcgttgactgattatgatccgctattctgggcggacaaacagcatttcttcttcgatgacgtgccgttttataacttcccttatacgtttggctatcttttttcgatggggatttatgccaaggcacagacaatgcctgattttgaagcggactatatcgcactattacgtgatacggccaatatgtcgactgaagcattagcgcaaaaacatcttggggttgatttaacccaaccggatttctggcaagctgccgcggatagcatcgctaaagatgtacaacaattcctagctttgacggcggactatctcagataatgacatgctatttttaaattggtatatcatggtataataaacgagaatcgggcgctcacactagttggagtgaccaaattgatcggaggttttgaaatgccaacatatgaaggtagcgatattcaagcagcggtaaatgaagggttgcaagctatgcatctaacgcgtgaggaagtgtccgttgatgtattggaagccggcaaaaaagggtttctcggttttggtcgccgcttagcagttgtccggctaacgccaaatgaacaaccaagccaagttaaacaaagcgccccagccccagttcaagagctagttgaaccaacgccaacagacaatttaactagtacgccgcaaaagcggaaaagtggtgtggaaacggaagctgagttaagcgcctatttggaagccatcacggctcaaattggcacaccggtcagcattcatgtaactcacgaccatcggagtacgacttatcatttgaagaccgataaagaaggcttgttgattggtaagcatggtaagacaattaatgcgctccaatatttagcgcagacttactttgatcatcatatgaagggcaagcaaaccattatcctagaagttggtgattatcggcagcgaagagcagcgattgtcagccaccttgccgataaagcagcccgtgaagtcgttgcgaccggcaaaccagtctttttagaaccaatgccggcttttgaacgcaaaattgtgcatgggcatttagcaactaatcaccatgttcaaactcattcagaaggccaaggcgatcgccggtcaattgtggtggaattagcgcgcacattttaggtgttgtgaattgacgctctaaaaaaatcgtgtataatgaaactaattaaatatcgataaagtagtgaaagtgctttgtccaccccttacacaatgacgggaggggtggacgctaagcgctttttttatgcagctatttcggaaaggaagcatttaaaatgccaacgacagtcacagaatttgatacgattacggcgatttcaacaccacctggtgagggggcaatttcaattgtgcgtctttcaggggatgagagtttagccattattaaacgcgtttatcgcggcaaagatcttgatcaagtggcgagccataccattaattatgggcacattatcgatcctaaaaccgacgcagtagtcgatgaagtcatggtgtctgtcatgcgcgcacccaaaacgtttacccgcgaagatgtgattgagattaattgtcatggcggaattgtcgcaacgaaccgcatcttacaattattaatgagctatggtgcacgaatggccgaaccgggtgaattcacgaaacgagcctttttaaatgggcggattgatttaacccaagctgaatctgtgatggatctgattcgggctaagactgatcgggcgatgcaagttgctgttgatcaattagatgggagtttaacgcacctgattaagaatttacgccaagaaatcttagaagtattggcgcaagttgaagtcaacattgactatcccgaatatgataccgatgaaatgacgacgcggattctacttgaaaaagccgaacttgtgaaagcgcggattggtgaactacttcaaacggcacaacaaggaaaagtcttacgtgaaggcctagcaacggccattgtcggacggcccaatgttggtaaatcaagtttgttgaatcacctattacatgaagataaggcgattgtgacggatgttgccgggacgacgcgtgatgttttggaagaatatgtcaacgtccgtggggtaccgctgaagcttgttgatacggcaggaattcatgataccgaagataaggtagaaaagattggggtcgaaagaagtcgcgcagcaattaccaaggctgacctgattttattagttttaaatcaaagtgaaccactaacggttgaagatcgcgagttaatcacggccaccactgataagaaacggatcattattttaaataaaaccgatttaccgaacttgttagacttaaatgaactccaaacattggtgaatgcggatgaagtaattcaaacttcaattttaacaagcgaaggggtgaccgatttggaagcccaaatcgccaaactcttcttcggtgggattgaaaatagtcaaagtacggtcatgattactaatgcccgccaaattggtctattaaaccaagcacaacaatcattagatgaagtcatcagtggaattgcagctgggatgccagttgaccttgtgcaaattgatatgaccaactgttgggataagctcggtgagattaccggggattcagcaccagatgaattgattacggaactctttagccaattctgtttaggtaaataggtcttgaaccatattaaaggagaacaaaatatgcgagaatatgacgcagcgcactacgacgtgattgttgttggtgccggccatgcaggttctgaagcggctttagctgctgcacgaatgggccgcgaaacattactattaacgattaacttagacatggtggcttttatgccatgtaacccatcattgggtggtcctgctaaagggattgtcgtccgtgaaattgacgccttgggtggtcaaatgggccgcaatattgataaaacatacattcaaatgcggatgttgaatacaggtaaagggccagctgtccgcgcgttacgcgcccaagctgacaagcacgcttatcaccggacaatgaaacggactatcgaaacgacggagcacttaacacttcgtcaagggattgctgaatcattgatcgttgaagacggtgtctgcaaagggattgtcactaacactggtgcccgttacagcgctgatagtgtgatcttaacggctgggacagcttctcggggtaagattattatcggcgaattaacctattcatctggtccgaataattcaattccttctattaaactttctgaaagtttggaagacaacggatttgtcctcacgcgttttaaaacggggaccccaccacgcgtggacggcaccacgatcgacttttcaaagacggaagaacaaccaggggataaggaaccaaaccactttagtttcgaaacacctgatagtgcttatttgaaagaccaactttcttgttggatgacatacacgaatgatacgacgcatcaagtgattcgcgacaatctcgaccgcgccccaatgtttaccggcgtaattgaaggggtgggtccacgttattgcccttcaattgaagataaaatcgtccgcttcgcggataagcctcggcaccaaattttcttggagccagaaggccgcgaaacagaagaatattacgtcggtgatttctcaacctcaatgccagaagaaatccaacacaaaatgattcattcgattgaaggcttagaaaatgcccaaatgatgcgtcctggttatgcgattgaatatgatgtcgttgaaccatggcaactaaaaccaacccttgaaaccaaagtggttgaaaatctttatacagccggtcaaatgaacggcacttcaggatatgaagaagcggctggtcaaggcttgatggccggcatcaacgctgctctgaagcaaacgggccgcgacccattcatcttggaccgcagtgaagcttacatcggggtcttaatcgatgacttggtcacaaaggggacgaaggaaccttatcggctattaacctcacgtgcggaataccgtttgatgcttcgtcacgataatgcggatttacgcttaacagaaaagggtcatgcattaggcttaatcaatgatgatcgctttgacagctatgaagtgaaaaaagcagccgttgaagctgaattagcacgtttagcaaccattcgcttgaaaccaaccccagaaatccaagcctttttagcggctaagggtgaggcaccacttaaagatggtgttttagccagcgacttcttaaaacggccagaagtaaagtatgctgatttaatccaatttattccagcagtcgaaggcattgataaccgcgttgtggaacaagttgaaattcaaatcaaatacgcgggttacatcgataaggaaaaagctaaaattgcgaagttaaaacgaatggaagctaaaaagattccagccaatatcgattacgatgcaattgaaggccttgcaacagaaggtcgtcaaaaattacaaaaaattcaacccgaaacacttgcgcaagccagtcggattggtggggtcaacccagccgatatcgggattctaagtgtctatattcaacaaggtaagattgctaaggtcaaatagcctggttgataactagtcattagatatgttagagttaagcatatattgtcaatggtagaaagccagccgtttcacatgaaacggttggctttttagagtcatgaaagaaaagtgagggaatcaagtgataactgttagtgaaatgagcttaacgctttctgggcgtaagttatatgaagacgttaatttgaagtttacacctgggaattgttatggcgtgatcggtgccaatggtgcaggtaagtcaacttttctaaaattattagaaggtaaattacaaccatcatcaggccatatctcaatgggccctaatgaacggatgtcgagtttgaaccaagatcactacgcttttgaagaatttgaagtgttagagactgtgattcaaggtcataagaagttgtatgaagtgatgcaagctaaggatgccctatatgctaaagctgatttcactgaagaagatgggatgaaagctgctgatttagaagctgaattcgctgaaatgaatggttgggatgctgaatcagaagctgctcaattacttcaagccttagggattgatgaatctttacaccatgtgaagatgagtgaattgatggaagggcaaaagattaaggttttacttggtcaagcgctctttggcaaacctgatatcctattattagatgaaccaacgaatgggttggacagtgcctcagttgaatggttagaagatttcttagcagacttcccgaacatcgtgattgttgtttcccatgaccgttacttcttaaaccaagtctgtacaatgatgtgtgatgtggacttcggtcgcatcaagacattcgttgggaactacgacttctggttagaatcaagtaagttagccgctaagttacaatcaaacgttaacgctaaaaaagaagaacaaatcaaagaattacaagattttatcgcgcgttttagtgccaatgcttcaaaatcaaaacaagccacttctcgtaagaaacaattagaaaagattacattagaagatatccaaccctcttcacgtcaatacccattcattaagttcgatttcgaacgtgaattggggaatgatcttttacgggttgagaatgtttcaaaaacaatcgacggtgttaaagtgttagataacatcagcttttcagttaagccagacgaaaaagcagcaatcgtttcacgaaatgacgttgcgacagctgtcttaatgcaaatcttagcaggtgaagtgcagccagatactgggacagttacctggggtgtgacaagtcaacaatcatacttaccaagagatacgaactcagccttcaatgatgatcaactcatcatcttagactggttacgtcaatttgccgctaagggtgaagatgacaatactttcttacgtggtttcttaggcaagatgcttttctctggagatgaagtcacaaaagaaatcaatgtcctttctggtggcgaaaaagtgcgttgtattctatcgaagattatgttgcaaaaatcgaatactttactattagatgatccaaccaaccatttggacttggaatcaattacttcattgaatgatgctttgatcgatttcaagggtgctttagtctttacatcgcatgatcatcagtttattcaaacaattgcagatcatatcattgaagtatcagcgaacggtgttgtcgaacgtgctgaaacgaactatgatgagttcttagcacatccggaattacaaaaacaagttaaaaacctctacgtttaatagtagaaaaacgaaggcccctagtatagctaagggcctttttttattgttataagataattattatttatttacagaaaatccttgcatcacgggttgcaagttggtatactaataaagttgtcaaaagcgagctgattagtgataagcagtatcgtcaattaaataaaaagttttgaaaaacacttgttatttaattgaaaacatgataacatattatatgttgcttaaggagttataacttctaagtaataattaattaaaaatagttgttgacagacgataagttgtgtgatatacttaaaaagctgtttcaacacagtagatctttgaaaactgaacaaagtttcgacaaaccaaatgtgtagggtcgcccttcggggcacaaaacatatttgcaaagtcaatttcgctagcaaataaattaagtaacaaaacaagagctacaaacttttaatcgagagtttgatcctggctcaggacgaacgctggcggcgtgcctaatacatgcaagtcgaacgcactctcgttagattgaagaagcttgcttctgattgataacatttgagtgagtggcggacgggtgagtaacacgtgggtaacctgccctaaagtgggggataacatttggaaacagatgctaataccgcataaaacctagcaccgcatggtgcaaggttgaaagatggtttcggctatcactttaggatggacccgcggtgcattagttagttggtgaggtaaaggctcaccaagaccgtgatgcatagccgacctgagagggtaatcggccacactgggactgagacacggcccagactcctacgggaggcagcagtagggaatcttccacaatggacgaaagtctgatggagcaacgccgcgtgagtgaagaaggttttcggatcgtaaaactctgttgttggagaagaacgtatttgatagtaactgatcaggtagtgacggtatccaaccagaaagccacggctaactacgtgccagcagccgcggtaatacgtaggtggcaagcgttgtccggatttattgggcgtaaagcgagcgcaggcggtttcttaagtctgatgtgaaagccttcggctcaaccgaagaagtgcatcggaaactggggaacttgagtgcagaagaggacagtggaactccatgtgtagcggtgaaatgcgtagatatatggaagaacaccagtggcgaaggcggctgtctggtctgtaactgacgctgaggctcgaaagcatgggtagcaaacaggattagataccctggtagtccatgccgtaaacgatgagtgctaggtgttggagggtttccgcccttcagtgccgcagctaacgcattaagcactccgcctggggagtacgaccgcaaggttgaaactcaaaggaattgacgggggcccgcacaagcggtggagcatgtggtttaattcgaagcaacgcgaagaaccttaccaggtcttgacatcctttgaccactctagagatagagctttcccttcggggacaaagtgacaggtggtgcatggttgtcgtcagctcgtgtcgtgagatgttgggttaagtcccgcaacgagcgcaacccttattactagttgccagcatttagttgggcactctagtgagactgccggtgacaaaccggaggaaggtggggacgacgtcaaatcatcatgccccttatgacctgggctacacacgtgctacaatggatggtacaacgagtcgcgagaccgcgaggtttagctaatctcttaaaaccattctcagttcggattgtaggctgcaactcgcctacatgaagccggaatcgctagtaatcgcggatcagcatgccgcggtgaatacgttcccgggccttgtacacaccgcccgtcacaccatgagagtttgtaacacccaaagccggtgaggtaaccttcgggagccagccgtctaaggtgggacagatgattagggtgaagtcgtaacaaggtagccgtaggagaacctgcggctggatcacctcctttctaaggaataatacggaaaaccttgtacatttgcgaagtcgaaactttgtttagttttgagaggtctactctcaaactttgttctttgaaaactggataataagtaatatattagttttaaaagccgagaaaacattgcgttttaaagagttttttaatagaaatatgaattagttcatatcgctaaactcaaataataaccctttaccgtaggtaaagttaggttaagttataaagggcgcacggtggatgccttggcactaggagccgatgaaggacggtactaacaccgatatgcttcggggagctgtaagtaagctttgatccggagatttccgaatgggggaacccaatacctttagtcgggtattatcattaagtgaatacatagcttaatgaaggtagacgcggggaactgaaacatctaagtacctgcaggaagagaaagaaaaatcgattccctaagtagcggcgagcgaacggggaagagcccaaaccaagaagcttgcttcttggggttgtaggacagaacattggagttaccaagttaagttgtaatcgaatcagctgggaagctgagtcaaagagtgtgataaccacgtagattaaacaacttaacctccgttctggatcctgagtacggcggaacacgtgaaattccgtcggaatccgggaggaccatctcccaaggctaaatactccctagtgaccgatagtgaaccagtaccgtgagggaaaggtgaaaagcaccccggaaggggagtgaaatagatcctgaaaccgtgtgcctacaattagtcaaagctcgttaatgagtgatggcgtgccttttgtagaatgaaccggcgagttacgtttatatgcgaggttaaagtgaaaagctggagccgtagcgaaagcgagtctgaaatgggcgagtgagtatatagatgtagacccgaaaccaagtgacctacccatgtccaggttgaaggtgtggtaaaacacactggaggaccgaacccacgtcagttgaaaatggcggggatgaggtgtgggtagcggtgaaattccaatcgaacttggagatagctggttctctccgaaatagctttagggctagcctcggaatattggatcatggaggtagagcactgtttggactaggggcccgtcatgggttactgaattcagataaactccgaataccattgatttagttccgggagtcagactgcgagtgataagatccgtagtcgaaagggaaacagcccagatcaccagttaaggtcccaaaatttatgttaagtggaaaaggatgtggcggtgcacagacaactaggatgttggctcagaagcagccaccatttaaagagtgcgtaatagctcactagtcgagtgccgctgcgccgaaaatgtaccggggctaaacataataccgaaactgtgggtggacacgtaagtgtccgcggtaggagagcgttctaagggcgatgaagctagatcgtaaggactagtggagcgcttagaagtgagaatgccggcatgagtagcgaaagatcagtgagaatctgatccaccgtatgactaaggtttcctggggaaggctcgtcctcccagggttagtcgggacctaaggcgaggccgaaaggcgtagtcgatggccaacaggttgagattcctgtactagtttattttgtttgaacgatggagggacgcaggaagctaaggaatgcacacgactggaaatgtgtgtctaagcaacaagtcttgagttgagtgaaatgcttgattctttaaggacaagttgtgatggggagcgaaattaagtagcgaagttcctgatgttacactgccaagaaaagcttctagtgagaaataaactacccgtaccgtaaaccgacacaggtggtcgaggagaatatcctaaggtgagcgagtgaactctcgttaaggaactcggcaaaatgaccccgtaacttcgggagaaggggtgctgaccgtcaggtcagccgcagtgaataggcccaaacaactgtttatcaaaaacacaggtctctgcaaaatcgaaagatgacgtataggggctgacgcctgcccggtgctggaaggttaagaggatgagttagcgtaagcgaagcccagaattgaagccccagtaaacggcggccgtaactataacggtcctaaggtagcgaaattccttgtcgggtaagttccgacccgcacgaaaggcgtaatgatttgggcactgtctcaacgagagactcggtgaaattataatacccgtgaagatgcgggttacccgcgacaggacggaaagaccccatggagctttactgtagcttgatattgagtgtttgtacagtttgtacaggataggtaggagccgtagaaatcggaacgctagtttcgatggaggcgttggtgggatactaccctaactgtatgaccactctaacccgcgccacttagcgtggcgggagacagtgtcaggtgggcagtttgactggggcggtcgcctcctaaagtgtaacggaggcgctcaaaggttctctcagaatggttggaaatcattcgtagagtgtaaaggtataagagagcttgactgtgagattgacaaatcgagcagggacgaaagtcggacttagtgatccggtggttccgtatggaagggccatcgctcaacggataaaagctaccctggggataacaggcttatctcccccaagagtccacatcgacggggaggtttggcacctcgatgtcggctcatcgcatcctggggctgtagtcggtcccaagggttgggctgttcgcccattaaagcggtacgcgagctgggttcagaacgtcgtgagacagttcggtccctatccgtcgcgggcgcaggaaatttgagaggagctgtccttagtacgagaggaccgggatggacatacctctggtgtaccagttgtgccgccaggcgcatcgctgggtagctatgtatggacgggataaacgctgaaagcatctaagtgtgaagcccccctcgagatgagatttcccattcctttatggaagtaagacccctgaaagatgatcaggtagataggctaggagtggaagtacagcgatgtatggagcggactagtactaatcggtcgaggacttaaccaaaggtgcaatgttaggcttttgaaatgaaatattacttattatgcagttttgagagaacgaagttcttctcagtgcgcaagcacaaaatagtgtggtggcgatagcaagaaggatacacctgttcccatgtcgaacacagaagttaagcttcttagcgccgatagtagttggtgggaaactacctgcgaggataggacgttgccgcgcaaatataaaaaggttgggccgaaaggtttaaccttttttgttaccatcagttttttccaagagagagtagtgattaacctgcagctattagctaatgagatacttagtgttactcaggatgtttacgtggcctatgaagaaccctactagctgtgagtaggattaagctaagtaaaatataatatagcgcatcgtaattaaaaagccgtttaacagtcccttatgggatggttaaacggctttttgctatgctaaggcgtcattttctgtttcctgataacgttgcaagatgtagattgctaggataactagaattgcaccactcatttctacccaactaaagcgggcatggaagaagatgatacttagaataaatgtaattacaggttgtacggcatcaacgatactgattacggttgatggtgcaaagtttaaactgtgtaacaagcaaagatatgcgaatacagttccaatcaaaataacggctaaaattgcgataataccggaagcatttaaacgcggcggtgcttgccagaatggtcggtggatattgaagagtaaaccactgatgaacatgccccaacctaaaacgagaattggtgatttttcattaacgattggtcttggtagcacaacgtagaaagcagctgttacaccggataagattccccagattaatgaattaaaaggaattgttaaagtatggatattgcctttcgtaatagaaaggaaaacgccaattaaagcaattccgaatgagataatatcaattcgatttggccacttacgtaagaaagcgagggttccaataacgataaacagaggacttagatattgtaaaatagtcgccgctgctgcattccccgtttggatactcatgaagaaagtatattgattacccatgataccgaaaagggcgtaagcgattagccaagccgttaatcgttttgatttaaaaatggagaagatatcttgtttgaacttaattgccccgataagtaataaaattaaaccagcgccaagcgttctaacggataggaaccaagttgcagggatcttttgtccttgcgagatgaattccaaaatagtacctgaaacgccccagagtgcggacgccatagtcgcccaaaacatgcctttggcgatgttttgcggttgagttcgattgttcattgtgcgccatccttttttgaaaatttataactatactattataagctaaatggcgtatttatgctatttgcaaaacttttttcattattattccccacaaaataataaatatggcagtgataaagcgaactggtcaacaaaagctaattaagttatgatgaataaaaaagtgagggattcagatgcaatacattgcgttattacggggaattaatgtgggtggtaaacggccagttaaaatgagcgtgcttaaaactgcgtatgaagcggctgggttcaccaatgtgcaaacatacatcaatagtggcaacgtgttatttgaagccccagaaacaggcttaacaaccttagcggcaacttgtgatcagattatggtggagacctttggcttttctgtgaatatcgccgtggtcacagctgaccagttgattcaagctgttgcggacgcaccaacttggtggggcaatatgccagatgtgaaacataatttaatcgtggcgattgcgcctaaaacgggggcggaattgagtgtacatgtaggggcaattaagccagcgtatgaaaaagttgccgtgaatggtccgtttattttctggagtgcacccgtgaaaacattcggtcggacgcggtggtcgactgttgctaaaggggacctataccagtggctgacaattcggaatgccaacaccgctcgtaaattagtggcactcgcacaggcactacgggaagcatgaagtggttagactcgcatcttcattaatattcatatatacttatagtaataatcaataaagaaatgagggacgcgatgcgcttatccaatttgaaacagacgattatccagatggggttgatcttgattgctctcgaaattattgcgattgggattcaactcttctttgccccccatgaagtagcagccggtggggcaaccggtgtggggatcttattagaagaattgatggggtggaagatatcaacagtggtgtttgtgattaacatcggcatgctgatacttgcttacttcttacttgataagaaaaccacgttaagaattctctttggtagttttatgctaccagtttgtttagctttaacgccccaaatgatggtggtggaagacaaactattagcaattattatcgggagtgttgtttacgctgccggaattgccttgttatatcgaattgatgcctcgagtggtggctcaacagtgccaccgttaattttcaaaaaatatttcaatatcaaaccggcattgagtttgctggtagttgatttactagtctgctttgcgaatgtgttcgtctctggttttgagacgttcatgctggcaacttgttcatcaattctgacgttgattacgatgaactatattgagaccgggttgaaccggaaaaaggtcctctatgtcatgagtaacgaccaattacctgaaattaaagcccatttaatcgaagaatctgatgtgggcgtgacgatttttgatgttactgggggctattctaatgacaataagcagatgttgatgctcgttgttgaaaatcaagcctatcaacacattattaatcgaattcatgaagttgatcctttggcatttacgattgtggctaacgtagccgaggtacgcggcggtagtttataaatttaaaaagggtcgagacaattgtctcgacccttttgtgtgttattgatgattaaagtagcgatcagcttttaaattattgatggtgagcatgataatcaagctgatgatatagagtgttgaaatgaagagcatcacggtcatcaccgaataatgatcaagtaaccaaccgataatcacgctcgaaaatccaccgatacagcggccaacgttcataatcacgttattggcggttgcacggacttcggatgggtagaggcgactgacaatcgcgccatagcctgcaaacataccatttgagaagtagccgacaattgcaccgacgaacaataaagcacccatgctattggggaaggttaagatgtaaacgcctgctgctgaagcaatcaggaataagacaaaagcaaaccgtggaccaattcggtctagaatccaaccgaaagtcaacatgcctgctgacatcccggcaatcgtcgctaacatccaagttgatgaaccagccacactgaggtgcatttgttgttgcatgatggttggtaaccagttcattaaaccgaagtaaccagcgatttggacgattgccattatcatcagcgcaactgtttggtaagctagttcgcgtgttttaaaaagagcgctaatctgaccttttggttgatctgattcagaagtgaacgttgtactttcgactagatgatggcggataaaaaaagtaatgataacaggtaataggccgaatagaaatagtgcatgccaaccaaattgtggtaagacccacgctgctagaagtgccgcggcaatagcgccaagttgacctgcgacacccacgaaggatgaaacacgtccgagctgtttcttagggaaagattcggctaagaccgtcatgccaatcccatattcgccaccagcaccgatcccagctaagaagcgacagagataaatcatgggaagggtgtgggcaaatgacatagccgctgtcgcaaaagcaaagataaaaatggtgtaagtgaatgttttaatccgtccaacgcggtcggctaaaacgccaaaaaaaacgccacctaacaacattccaatattggtaatcgttgcgattaatcccgcctgtgttccactgagatgtaaatctgcaatgatggacgatagggtgaaagacaagaacataacgtccatgttttcgagaccgaagccggccgttgttgaggcgaccaccttagtctggtagcttgttaatcgatgttggctgtgtgccgtaatagttttcatattcagttttcctccaaaaaggacgctctctgtcgtcccttattttgcttggtgccaatcttagcacaggaaagtagtctgtgcaagggtgttatggaaaaagcgcaagcgtcctttgtgatataattgagtttataaaatggctcttcagcgatggagggcgtcatggaggctattgaatgactgataagaaaaaacactttacttttccgagcgcctacacagtaattctacttgttttactggcagtgatgatcttgacgtactttatgccagccggaaaatatgcgagtttacaatataacacgacccaggaaaacttcactgtggtcgcacccaatgggcatgaatcgacagcacctgggacacaagcaacactgaagaaataccacgttaatacggatttagcgaagtttaaggatgggtcggtgtataaaccagttgcgattccaaatacatatcaaaaactcaatcagcataaaccaaacttatttggcgcgattaaacaatttctgaatgcgcccattcaagggttatctgaaacaatcgatattatcacatttgtcttaattctaggtgggattgtgggcgttgtgaataagaccggtgcatttgcggccggaatggcggcgctatcgaaacgtttgaaaggtaaagaagcctggttaatcgtgattgtaacgagcttgattgccctaggcgggaccacctttggcttggctgaagaaacaattgctttctatccaattctagtgccaatctttatggcagctggctacgatgcgctagtcgcaattgcggcgatttatctaggcagttcaatcgggacaatggcttcaacggtgaacccattttccgtcgtgattgcttctaatacggctggcattagctttacagatggtatgggactaaggcttgtaatgctgattctaggcacattaatctgtattttctacacgattcggtatgctgaaaaagtaaaacaggatccaagccaatcgctcatttataatcaaaaagcagaattggaaaaacatttccttggaaatagtgatgtcaatgaagtaccacggtttgatttccggaagaaattgatgttaattatttttgcggccggttttgtcatcatggtcttcggcgtgaaggaatggggttggctatttaatgaaatttcctcgttattcttagcgattacgtttattttggcgtttatttccggattatcggaaaaagattttgttagtgaattcgttgcaggggcttccgacctgttaggtgtagcccttgtgattgctttagcacgcggcgtgacgattattatggaacaggcacaaattagtgatacgctattgtactggttaagtagtggcgtttcccatatgagtggtgttatcttctcaacggtgatgttcttcgttttcattctactaggattcttcattccgtcgagttccggtctagcggtgctatcaatgcccgtcatggcaccgttggctgatgtagtcggtgttaatcgtgacgttattattagtgcttataactggggacaaggcattatgtcgtttatcacgccaactggtttggtcttggcctcgctggcaatggtccatgtaacgtttgataagtggttaaaattcgtttggccattaatggcgattattggtctattagcaattattttactcggtgttagtgtctatctttaaaaaacggtcaaaaaaggtccgccacaatcgtggtggaccttttttcgtgattagtaaactttaaatttcgttactggccagtagcggagtttgacaacgccttgaatcccgttgaaggttttagaatcatcactgacaaagcctacttcttcataccggctatcctttgaaacagtccggttatcacccatgacgaagtagtggtgggcagggactgtggaacgaccaagcacgtcctttaaatcaaagtttggcttattagtctttgggttgagtgtgaagtagtttgacccggctaggaaggttgttggatcttttttatagtcatttaaataaggctcactgacttttttattattaatatagagttgatccttgttgaagcgaacagtttcaccgggcatgccgacaattcgtttaatgtagaattcacctggtgaatcaggggccttgacgataacgacgtcgccgcgtttcagtttcgtatggcgtagtgcaatgacccgatcatactgtgtaaagttgggttgcattgatggcccgaaaatttgttcattggcaatgacgaatttaagcagtaattgcgcaatgccgaccatcacggccgctaataaaatgatttgtatagtggatttccaaaattcttttgctttagctgacatatcgcacatccttagaattcaatagattcattgtactacaattaattggtagatgacaacaaaactgtacagttccttaactatttaaacgatcttttaaattaggggaacgccgcgttatttatcacgggaaacggttcgtggtatactgaaagggattattttaaacgacaggaaaagtgagtttaacgcatggcgaatttagtaattgtacgacatggcgagagtttagccaatcaattaaatacttatactggttggtctgatgtgccattaacggctgctgggcgcaaacaagcacagcatgtgggccgacaaattcaagcaaccggaattcaattcagtcatgtgcatacttcgttattgaagcgtgcaattttgacgagttacattattctggatgaaatagaccaattggccattccaatgacgaagagttggcgattaaatgagcgccattatggggcattgcgcgggttaaataaggaaaagacgcgggctatttttggtgcgcatcaagttgcccgctggcggcgtagttacacggcggtcccacctttattgacgactttttcgcaggcccgtcgttatcgactagttccaccgatgagtcggccacgcggggagagtcttgcacaggcaacgcaacggctattaccttattggcaagatcaagtagtgccaggattacttgcaggccaggaccaattgattgtagcgcatggttctactttgcgtgcgctcattaaggtgatcgaacagatttcagatcgcgatattgatggtgtggaagttgaaaatggtgaagcactgtattatcgattcgatgctcaaatggtagtcattgagaagggacgattagcggactaagcggatggacaacaaattgaaaagaggactgctgttggtagggctcatcctactaattattggcggcacgatttatcatgaacggcaaaaatatgccgtccaaactcaacaaacccaacaaaaaatgaaacaacttcagcaacaattacaggcaacaaaacttgagttagccattcaaaaggcaaaaagtcatgaagccgggattgatgatcgaaccatcaatcatttgagtgcgaaggaacaacaatttgtacagcagttgctacatgataacagttttagcgggaccattttaattgtgcggcggaatcatgtgttatttcaaggtggccggggctatgcaaattttgcgactaagcaactgaattctccacagacgacgtatcagattgcatcgattcaaaagtcattaacggctgcgttattgatgaaacaggtgcaagccgggaacatcgatttagcgacaccgttaagtcggtattacccgcagattaaagaggcggatcaaattacgctgaagatgatggttgatatgcgttctggactgactgaattatctgcaccagaaaaagaattatcagatcaagcgcggattcaatatgcgcttgatcatttggctgttaaagatattggtcagcataattattcgccagttaattaccttcttttggccgggattttagaacaagtcacccataagagttatcgagagttagttggaaatcagttgataataccgtttaaattaacatcgtttaattttatgccaaatgaaacgaccggccaacaagcgactgcttatggttatcaacaagacggctatggcacgccagttagtgaaccaagttacgtatatatgcgtgagttagggaccggaaatatgtatgccacaacgagtagcctctttcgaactgaacaggcgattgttcaaggaaaagtttttaaaaaatcgttattaaaaacgctccgctcatcgactactggtgaatatacgggtggtgtttataattacaaagattattttacaagccatggggtcgaatctggattcgaatctagcttgcagatgagtcaggatgggcgttcaggaattgtcttattatcgaatcaatataaggccaatccttcaatcggacttctaacgaatcaactttataagcagttaattacgctcaatcgttaaaaaagcagcttggcttaatgcctagctgctttttgtttggactgtaaaatgatgttgtgcaagtgtccaaaggccaaacccaattaaacagccaaaccagtttaagaggatatcactgagtgcgaaagtccctagataaaaggcgaattggagaatctcaatgcctagaatcgttaagagcgctatgatgttcgtttcaacaaatgaggctttcaaatggtacaaaccgcctaatgggatgaagtaaacgacattcagtgcggcttcgagcagtgttttgtgatccttttgaatgaaatcgaacgggttcaagctaactgcatgatagacgtttgctttagtgaataagacaatgaataataagagcagatagacgctgtagacgagataaccatagattggcgatagttgtcggcggtcccattgcacccagcccaaccaaaatgtaagggttaaaaatagaatcagaaaaagcgtcgttgctggaaaacgggccataacccgggttaagcgtggataactgttgagtgttggtaagacaatgtgccacacgaagtagcgacttatgaggtaggcgaccacaccggctaaaccatattcaagtatcttgcgcattacgattcctccagtgattatagtttggtttgggcgaggcgtttagtgaattcagccataaagtcaaaatgttgtgtgtcggctaacgtatcttctaatttatttagaagttcgttgagcgcttgttgttcgtcgggggttaggctaccgaataaagtctccgtaaattcattgcgaccatcgagggcttcttttaaaaccgctcgaccggccgctgtaatgaagacgtgggtgattcgccgatcatgatgatcgggccgccgattaatgtagtgtttagactctaatttgtgcaagcattcggttagggatgaaggccgaatatcgagactttcggcgagggctccctgcatttgtccgttttcgatattaaggcgttttagaatgcgaatttggctgactgagcgatgatcggatgaaaattgcatgccataataatggcgataatggtgaatcaccttattgaaagtttggaaaagctcgttagatagctcggtcatggggactccttaataaagtttaatttgagatgctaatacgggtataatacgtcatttcataaggtggagcaatattgctcaggttttatcaagattgttgtgaataattttacataataaccgcaaaaaaaacgatggttaaactgagtcagttctaaccatcgttttggggttgttattgagctgcctttaagaaatttaatgcagctgcataatctggttcgtctgtttgttcgataattaattcggtgtagctaattgtaccatctgcttccaaaataaagattgagcgttgaagcgtgttgttgcttggaacgtagagttgcattgctttcccgaaactgagtgcctcatcagaaaggagttgcatgttcttaacgccttctgcagcgcaccagttattttgttgttcgatggtgtttgttgaaattgtgtagaaatggacgtcttcgaattgatcgacggcttggttaaaatgctttgtttgaatgctgcaaacacgggtgtcaatgtctggcacgacgctaattaaagtccgtttaccgagcaattgcgcagaagtcaccgtttcgccagcggcatttttaaggtcaaattggggtaactgtgtgccgacggctggtggtgtgccgattgtatcgagtggttgatcatgtcttgtgatttgcatttgcataaacctcatttcataataaaagatgcttttattctaagctgattgtgctgagaacacaattaatcacgctcgaggagtatagaaaatcctgaattattcatacttttcccttaaggactactttttgttgttgtcatgctagttcgcatctttttcgtttttcacctgttgggtgtacaaaaagagcacatcctgtgctattgtaaaatcgatgaaaaccacaaagaacaggagtgctccttatgtcaactttacatcatgaaaaacttttattcaatgaccagatcaacatttctaatgacggtggtgagttagcgaacgatgccggaactttattaattgctgaatttctgcaccaaattcactttgaccagctcttagaagataacttgcattttaaagatgaccgtaaatattgtacctttcccttgaacaatttatttaagcagttgctgttgcaattgctggcaggatactgccaagatcagtcggctaataccttgtcacacgccgttgattttaagctggtcttgtctcaagcggtcgcttcccagccgacactttcacgctttatcaatcacatttcagcgtctgggctcttttcagtcaaatcattgctcggctcggtagctcactttgttcttgggcagctaaatcaacatcagctgatccttgatctagattcgacacatgccgatacgtttggtgaccaagaaaagagtgcttataacggtcactaccagaccaacggttatcatcctttactagcctttgatgctttatcgggctgcttgttgaatgctcaattacgccccggcaatcgctatacttcccaaggtgcgactaaatttttattacggagcttacgggcctatgacggatcttccctggatgtcttagtgcggggagattctggtttcgcagctccagggatctaccatgcgtgtgataaaaagcaggctaagttcgtgattcgtttaaaagcgaactaccagctccaaagtcgggctgaaaacctgatccaagtgggtgaccaggacttcaccgaagctgaagtccaatggcatgtcctgcgagactattgtcctcaaagttggtcacgaccttatcgtgtgattattaaatcaacgcggccggcgggcaactttctgtttgaccatgagtttatcgtgaccaacttggaagaattaagcggtccacaagtctttgccctctatcaccaacgcggttccatggaagacttgatcaaagaagttaaacgtggctttcactttgataaaacggacagttctagttttgaggccaatgagttccggatgctggtagctggggtcgcttataatatactgcaagccatgaagaacttagttttaccaacaaagcttaaacacgctcaggtcgggacgatccgttttaaattactccatgtggcagctaaggtcacgcaccatgcgcgtcaagtctgggtccatttatctcagaccaatgtgttcgataaattattttggcagacactgttcaagattcaaaatctaaaaatatatccgctgtgaactcacaaaataaaaaatgtttttcttagggaaagggtgaagtctgtccttttttaaacagtccgacaacaaaactaacaaaaagctgctttttttacacactaaagtaactttgcacaaagttttaactgcaacgaaaagtatgaataattcagggaaaatgttacgtaaaaaaattcaagccttatacgctaaaaagatgctgaaccaaattatcaaagaggtcaatgtcaaaccgctcgtttatgaaattgtcgatgcaagtgggactgaaaccgcggttttgctaagtcatgagcaatgggtcaaaatccaagccgcgttaaccgctaacaagtagcgtgaattcccgatttagacttaatacggtaactaagctgtaacatttctgtaatagttgaatgttacacttgttcttagttggaaaaccgtacataagttaagtatttttaaaaatgataaaggggaatcattcagtgaaaaaagtcagtcgattaatgttcagtgcactagcattcttaacaattgggtcaacaatggcggttagcattggtgcagtcagtgccgatgaagttgctgatacaaaagcatcaatgacaaaccttagtgctgaaaactcggctttattagctaagttaagtgctgcacaaaataaggttgcttcaatcgatagccaagtgtcaaataagaccgttgcaattgatgatgcacaaaagaacattgcatcaacggacaaagaaattactgaagtggctcaaaaaatcgttaaagttcaagctgaagtccaatctagaaaagctgttttaaaagaacaagtaattgcgcttcaaaaacgtgctggggatagtgtttctggaaatgtttacgttgacttcatcgtcaatagtgatagtttctcagatatggtcagtcgtgcttcagttgttggcaagttaaaccaagctaacaaggaagcaatggacgccgtagcgaactcagaaagtaaattagctactttaaaacaagaacaagtgactaaaaaagcaaacttagttaacacaaaagcacagttagaaaaagatcaagcacagttaacatcacttaaagcagatgcagaaaatgaacaagcaagtttccaacaagaagtggatggacataagacacagcttgctagcttacaaagtcaattagatgctcaaacagcagccgctgttgaagctgctaaaaaagaaactgaaaaagcaacaatcgcaccaacggttgcacctaaaacaggttcagacaatacaccagcaccaacgcctgcaaaaacaacgacagttgcgccatctggtgcaaacactggttcattagttggcaatgccttacaattcattggcacaccgtatgcatggggtggcgcacaacctggtggttttgattgttctggtttagtttggtacgctgctaagatggccggcattagcttaccacggacatcacaagaacaaagcacggttgggacaaaagtgtcattatcagaattacaacctggtgaccttgttttctggggtggcgttggttcagcacatcacgttgggatctatatcggtggtggctcatacgttcacgcaccaacagaaggccaaaatgtaacaacgatgtcaatgcaatattacaaacctgactttggtcgtcgtttataagattaaataaaagaataaaaaagtttggcgtctgcttaaattaagccgccaaacttttttatttatttaaatcctgaatagaagagtgtgaatgaatagtgacaaaacaactattagtcattacgggcgccacgggtagtggcaaaacaacggtgagccattatttaaaagaggcctttcaaattccacaagtggttacccataccacgcggcctagacggcataatgaagtcgacggggtggattattattttgaaacaccagacaccttggcacaaaagcacctcgttgaatcggtgagctattctggctatcaatatggctcttcacatgaagcgttagatttggcgtggcaaaaagcacagctgattagcctagttgttgataccaaaggggcacagacttatttagagacgttccccgaagaagcatcggtcttgttcttaacggtttctgaaacagatgcgttgattacgcgccttgaaaaacggaaggatagtcctgaagcaattcaaaaacggattcaaagtgctgaatttaagcgggatctgatgttaccgagtcatttaaatcaacgggcaactgtgttggttaacgatgactgggaaacaactaagcaagccttagcaacattaatcgcaaccctaaaaaattgatcattgaaaataaaaaggaagcctgtcgaacgcgttcgacaggcttccttttaacgtatggttaacccttatgcaaatgagtgttggttaaccgaattggttcgtttcactttataactgagtttttgtacggcttgttcaattgtaataccacttgcgctgattttttcattgttcgttgcagttgcgataaatttttgagtttgcgtatcaagtgaaacatgataccaattattagtttgactagtaaattccatcgtaaaatctcccttcaaatgactataaatactgatagaaggctaatgaagacgatttcttaaaaatcatctgaattacatcataacgcgcagcctgagataatgcaactattttgtattcggatttattaaaatttggtgaaatttagttgtgcttagctaacggttatgggattaagggtataatggtaaatagtgtggggtaacaactaaattgaagttggtagtaacaagcgccagcgcctgacaacctagaaagcatgtgctagaatggcgtatcgattaatcgagaggagcggatgtattaaatgagcgaaataaccactgccattgccgtattacgcgcaaatgggtacaaaattaccaagcaacgccgagagatgctacagtatttatcgggatatgaaaatcgctacattcccgtgactcaaatcgacgagcatatgcgcgccatttttccgggaatgagtcacaatacgatttatcgcaacattaaagattttgaacaacttggcttagtagaacaacaaacagagggtgaacaggcccacgttaaatatcaatgcgattttgaacatcgccaccatcatcactttatttgccgccagtgtggcaaagtgattgaattgaaaatgtgtccgttagatttttttagtcagcaaattccaaattgtcaaattgaaggtcatcagttcgaactctatggcctctgtgaagactgccaagcataatagaaagggagcgttaaaatggcatatcacacaccacccattattccaccagccgccattatttcgttaattatcgcaatgagtgcgaccaacattgtggcaaatacggttaaacctgttgaaaacaccaagacagagcagtcgtcatttgtttcaagtagtagtgcaaccacaggttcaaccagcagcatgaatacatcagaaccagaatctgagtctgaatcggaatcctcatcgacctctgaatcaaccgttaattcctcttctaaggctgtttcaagtcaggatcggacggatacggatgccaactcacaatcatctgatgatgagcagacaacaacaccacaaaatgatgagtcagctaacacgaccacggcaagcagtagctctgctaacacaagtagtagcgctaaagtggtttcaagtagtagcagtgccactgctacgcagtaataatttgttttacgcgcaataagggggacatttatcgtgttaacttttttagacattattaaccattatttcggttacttaaatattaatggtcgcgttaaaaatcgccttttttcagttatttgtttaattggtgatttttatcttctatataagagtgtgacctactttaaagctcaagcggttggacgaggtgtgattaacctcctcgtctttttggtgttattctattttgcagtgatgaacctgtatttctattatcggggcaaaaatgcggtcatcgatatttcaccgtatgttgaaaaagcgctgggtggtgatccaaacgcgccacatccactaaatggggtaaccgccaaaacgcaagtgatctcacaaattcaaccggccactggcttatttgaagaacaaaatctcttgcccgcgcaactgacaatggacgcggaacaaacccaacgtttaggatccttgattaacgaactgattgaatctggctatcttagcttgaattacgcaggcttaagtgataatgatatatatgaacaagcgcaacaattgcagcgaccaatttatgcgattgggaatcaagttgctttaccgttttatgaaatgaaacaagaagcagatcgttgggtgctctatggggggattaacgccattgccaaacaaccgttagcgcagattacgacggttggcttaaccccaatccaagacctagcccaagattatcaacttgcagtcgcccatacttggattacgggtggcccgaacaagatggccgggcgtagtggcgtgcttgaaggcaatgatccctatcaattagtggttcagattgcgtaccaagaacgaacaaagtagtcagtggaggaaaataggtggagattcataacgaattcttagatgtcaattattgttaccaatactacctactagaattagcggataacggcaattattacttaacagggtagattgtaaaatttttaatttatctttcgccggatttttaaactattccccgatttaaaattgaagtgcaacacttgataactagaccaattagactagcttaaaaggccatgaaggcctattcttattattaacgacaaaatcaacagataaggataggtgtcttcatgacccaaactaagaatatcatgcctaagcattaccaacaactccaatcttttgaacgcggtcaaattgagtccctgactcgattaggatttggcgttcgtcagattgccagccggcttcaccggagtcccagcaccatttctcgcgaattaaaacgcgggttaaccacccagattgattcccagaaacatcggtcatatcagggctactttgccgagcgcggggcggcttactatcgagaacagcgggccaagtgtcaccccaaaggtttactgcagcgggctgccgtgttcttcaagtccctgccgaaagctttaaaagctaagccacgagttttcagtgtcgacacgtatgtccactatttcaaagctcattacccgggctttccctgcccatcaacggctacggtctatcggtatatcgaggctggcaagctcccggagcttcacaactatgatttacccatgaagctacgtcgccgcgttaaacgcccgaatcaccgacatgcccgcctgaataaaaaacggcttggacagtccattgaagaccggcccgcagtggttcggaaacgtcaggagttgggccattgggaaggcgacttagtgaaagccaaacgggttgagtccgaaccagctttaatgacgttaaccgagcgagttagccggatggaaattatcgttaaattgcctgattaccgggcagagacttgccggcaagccctccaagatacgattgatgattacggtgcagaaaactttcggactatcacgtttgacaacggttcggaattcgctagtttaaatcaggttcaaggaacggaaatctactttgcccatccatattctccctgggaacggggcactaatgagaatgtgaatggtcaattaagagagttcttcccaaaggggtattcctttaaaaacctctcattagtggatctgcagttggttcaagacacgctgaatcaccgtccccgccgctgtttaagctatagttgtccagcggatgttatgccacaactggtttaactttctagaccaattataagaataggccattagtgttgcacttaacttgacaattgaggtttttaaactatttaaaatatacgcattttattcatccacaaatgttatagaattaaggcaatcaagtaagtgttttaatcctaataaaaatagtgggtacaataaaatgacgatttattatttaaaaccagaaaaaacagtcgataaaattatcaatacattgcacgctagtgttgctagcatgcaatattttgaaacgctagatatgatttgcgaaaaagttgagtttaatcttgatgaagccgcgctattacaacgaattaagcaactagccgatgattaacgcgcagatttggaaacccttcattcaatcggggtttcagaaaatgatatcgaccgtttaaaagctgcaggtttattattattcgttcaggataatgagattccacaaagctatgtgacgctcagtcggaaagcattagttggtttgcaagagattgcagtggcttatgctcaagagtctacacagctaacaatgaatattgattcaaaagaaattcaaagcttaaaagcagcttcagataagtttttcagaaagtatcaataagaaattgaaaaaagcccatcgacatttatgtcgatgggcttttttgtttgccgcaaagtagcgcttggctatgcttgaacgaactttttaacgggtcctaataggtctgggttgatttgtgcacgaatcaacgtgccatcttcttcatagctttgtttagtgatattggcacgatcactgaggtacgaaacagcttgcccttctgtgtatgggactaagaagtcgagcgttgggtattgttcaaagagttgtttgttaattaaggcaatcaatgcatcgattgctacttcgtcgcgagctgaataaacgatttggtttccgtctacttcaggatagcgcgtatctggtttcaaatcagctttattgtaagcctcgatgactgggatatctttaatgttgagtgattcaagggtttcttgtgtcgtttccatcatgtccaagtagtttggatctgagtaatcaaccacgtggattaaaagatcagcactcgctgcttcagctaaggttgatttaaaggcttgaattaagtgatgaggaagttttgtgacgaaaccaaccgtatcactcaacaggaatttctgttggttggggaggacgatttcgcggacactcgtgtctaaggtggcaaagagcatatccttttcaaaaacttgtttttcaggtgtatcggggttcaaccgttgtaaaattcgattcatagtcgttgatttacctgcattggtgtacccgacgagtgcgacaactggaatcgcatttttcgtccgttgacggcgttgtacgagttgttgttgatcgattttagcaagttcggctttgagcttcgtaatccgtttttcgatgagtcggcgatccaattcaagttgggtttcacccgccccacggttcgcagtacccccgccaccttgttgatccaacttgttttcagaaggatggaggcgtggtaattggtatttcgcttcggcgatggccacttggagttgcgcttcttttgttttggcacggctagcaaagatttcaagaattaattgcgtccgatcaagaatgcttattccgagttctttttctaaattccgaatctgtgaaggtgaaagttcatcgttaatcaagataatgtccgcatcttcagcgacggcgcgttctttaatttcttgaaccttccctttaccaaaataagtggcgtgattagcttggtcgatattttggcgaacgtcaccaacgacttctaagttatcggcacgggctagttcgcccagttcgcgcattgtatagtcaaaattaacttggcgttgactaacaccagtgattaaaacctttttaggttgcatataagtttcttccatgagatctcctttttgtgagagtgcgtcttcaaatggtcagccgttgaggattagcaatatctcgtaaatgagcggcaacgccgattgtttacgagatggcgctaaacgcagacggctatttgaagaaagcacgtttaagataagagtgcggcaccggcggttatctgctgaggattagcataggcagacgaaaaaccgatttgttggttatttggctgacgtagctaaccgagagcagatgcctggtggagcacgtttcaattgaaaaaaaggccatggcaaaaatattcttttgtcacagccctcagttaattaaatttaaaaagcgaatgccaacagaaatagccgcaaaatggccacatgattattcaattgtgattgcgattaaacaaacgttagttgacatgttgttgacgctcctttgatgtgaaatgggtggttacccaccttatccgttaagtgtaccatgaaagccattaaaaaccaaagttcgcctttagcgtgtacgccaataattaacactgttgtgggtgcccagcgtaattttatggtagaatgtaagcggttatcaaaatacataagagaatcgattgggggattgacgaatgaaaaatttagcattacttgatgttggtggcactacgattaaatatggtttatgggatggtgcggcgcaacaattgaccaaacaaggggctgttgccacaccaaagtcgttgaatgcgtattatgatgtgctgacgcagattgtggcggagtttaaggctagtgaccaagttgttggggtcgcaatgagtacgccgggtgcagtgaacaaggcgacgggtattattgaaggggccagtgcgctcccttatattcatcattttgaaattcaagatgaacttgaaacgcgctttgacttaccagtcgtaatggaaaatgatgcgaattgcgcggctttagccgaagtcggtagtggggctgctaaagggctaaaaaatgtgttgttcatggtaattggcactggcgttggtggttcagtgattgtcaacggacaagtccaacatggtcgccatttattcggtggtgagtttggctacatgatgatgaatgatggtcggattttaagtgaagtcgggaccgccgttcacatggctgaccgttataatcaagaggcacatactaactactcagggcgtgaagtttttgaattggctgatcaaggcgatttactcgcgcaaaaggaggcacaggtgctctatgataatctcgcacaagccatctataatttacaatatagttttgattcagaagcggttattttaggtggtggggtgtcgcaggccgatttcttggtgccaaatattgaaaaagctttacaggaaatactcaagcaagtcgatattgcgcctttcatgccaaccattcggacgtgtcagtatcataatgatgcgaacttgattggtgcaatggaagatttccgccgcacatatccgaatttagttgcaaattagactagtaaagaccgctttcaacatgtcataataaatattataaatgatattaggaggcggttaagatgcccacggaaaaacaagcattaaatcaaacgattggatttaccgcggcattagccactgtgatgggaacggtcatcggcgctggtgtgttctttaaagcggatcctgtgacgcatgcgaccggctccaccgggctgacaatgcttgcatggcttgtcggcggcttaatcacaatttgtgctggattgacagctgctgaattagcagctgcgattccagaaactggcgggatgatgcggtacatcgaccatacttatggtagtttagcggcatttttattaggttgggccgaaacaacagtctactttccagcgaacattgcggcgttgtcgattgtttttgcaacgcaatgcattaacttattcagttggtcagctcactggcagattccaattgcaatcatcgtcggactcagcttaacaatcttgaatttctttggttcccgggttgggggactattccaatccttcacaaccgtctttaaattaatcccgcttgcgattattattgtgttcgggttaattcatccaggcagcaacgccgttcatgtgtcattatttgacgtgacccggtcaaatggatcggggagtttcctgtcagcgctgggcagtggtgttctagcaaccctctttgcgtatgatggctggattcacgttgggaatattgcgggtgaattgaagcatccggaacgcgatttgccgcggtcaattttaattggtttaacaggaaccatggttgtctacctcttagtgagcgccgtcttcgttcttgtgttgccaatcaatcagattgccggcaatccgaatgcggcttcagaagtggctcgagtgctatttggtggtgtgggtggtaaaatcatcactatggggattttaatttccgtctatggcgggattaacggctacacgatgactgggatgcggattccttatgcgatggcgctcgagaatcggttaccattcagtcgacaactgcgctccctttctaaaacaggcgcgccggttgtcagtggtttagttcaaattagtatcgccatcgttatgatgtttatgggtggcttcaatacattgactgatatgttggttgttgtcatctggattttctatattctaacgtttatcgctgtgttcattctgcgcaaacgtgaaccagaattaaaccgtccgtatcgcacacttggttatccagtgattccagtcatcgccattcttggtgggattttcatcgtggtgaatacattattcacacagacgatgttaactttaatcggaatcggaattacattactcggattgcccttttattactatttaaaaaataaatatccagtcgtttaacacaaaaaacgaagttcgtgaattaactgaacttcgttttttttgtggtcaaaaaccaattgtagcaacggatagacgaaaaataaaatagttgcgcaaatgaattatcggcattaattgttgatttttggtagattgtaaaattaatccgaacgctgttcggacaaaaaagatcagcttcctttaaaatggtgtttaccacaaacccatcttttaggagctgatcttttatctagtataacctattccgaacgaattaaaatcgaaaccttttgtgaactagggctgtccaatatccaaatgggcgttcggctgaaccgatcaccgtcaacaatttcttatgaattatctcgatgtcaaccttatcaggctgaattagcacaaacagatgccgaatacaagcgatcacgatgtggtcggaaaactaagctgagcgatgagttaaagcaaaaaattctcaaccatttacgtctaagctggtcaccaggaatgattgctcacgaatttaaactagctactaaatctatttataattggctaaatcaggggagaattggtttctccttgaatgatctacctgaacatggcgtacgccaacggcgtaacgttgaccaacgatccaaatataatcaatctttggggcgatcaattgaacagcgtcccatgatgattaatcaacgtaatcgcatcggcgattttgaactaaatacagtcgttggtcctcgtgggcatagtaaggcagttttattaactttaatcgatcgaaaatcacggttcctttgggcataccggttaaaagatcggacgacagcgactgttaatgaagcactaactaagttcctaaccacttttaatggtccggtgcacagctttactgtggaccgtggcactgagtttagtgggctagtatcacttgaatcacaatatggtattaagacctattactgccatgcttatacgccagctgaacgtggtagtaatgaacgctttaatcggaatttacgttatttttatcctaaagggactcgttttgagcacattagtgctcaagatttaacgacgacgttactccaaattaaccagcgaccgcttaaaatactcgactggcaaacaccgtatcaggttatgctgacaaatttgtccaaaaattcggattaaatttgcaatctaccttttataaaaataaactaggtcataactcatgagttgtgaccccttcgcatcaaaggttcttattggcgttttcagaaaattcgtaagtttatctacaaattaaaataatccgaaaaacatcgctcaaacattggttttaaaaggtttttaatgaacgattgacaattatcgtcgcgtgaaatatacttgcacataaccaaacaatgatataaactaaccttaactgctgcttaatcaagttgaaatgagtcgctagtttgttttaaataaatgattgtcggcttttgactagccggtggtcatttattgtacataagttaaaactatattgaatgaacggtggagggttgcagatgccagataataaaagaatattaacaattagtgagtggtatctggagtgtcagaacatcacgactcaattgaataaaatgagcgaaaaacatggcttaagttatgatcaatttctcgtgttggaacagattgtggaactaggacggaacaccccaggccaaattgcagtcgtatttgggacctccgcaccagcggcttcccgtaaaatcaatacgctacaaagtaaaaagtttattcgcaaaattcgtgatatggaaaatgaccaacggaatgtttggttagaagcaactgaagaaggcctccgcaagtacaaagcgctaaaaaaagatattactaagcatactggcatcaaagcaacggacttggagcacttacggcagataaatcaaacaattatagaataaaaaagggaaagcccatcatctttagatgatgggcttttttaataccaataaggtaaatcgtaatcattttatgcataaattggtataattgtgaaagaatataaaaagttgaacttaaggggtggagaaatggcaacattaatggacgtcgctaagcgggcaaacgtttctaagatgacagtttcgcgggtgattaatcatccggaacaagtaacagatgaattgaaggaattggtgtatgccgcaatgaaggaattggattaccgtcccaatttaattgccaaagccctagtcagcaacagtacccgaatcatcaaattgtgtatcttggaagacatcgacgttaccgaaccatattacatgaatctaatggtcggaattgctaaggcacttgacctacatcagtattcgctgcagttagtaacttggcgtaactttgatatcgggaattgtgatggctacattattacgggattgcgtgaaagtgatgttgcatggattcgcgatctgacaaagccagtcgtcgtttttggggagaatcagtacggttttgattatgtggatacaaataaccagttggggacctaccttgcagcgcaattagcattagagcgtggttatcgccagcttatttatattggaatggcgagtgaagaagcgtttgaaaaatcacgtgaagccggttatttacaattaatgcatgagcagcagcgtcctgttcagttacaccattttaacaaccatagtcatttgaccgaagcctacatcattgaacactgggcgcaattcaaactcgagactgcgtttatttgtgccacggatcgtctggcaattgggattgaacgggggattgcgtcgtgtggtggtcatgtgccgcaagagtttgggattacaggatttgatggggtctttttaaatcaagttgcctctcctaagttgacaacgattaagcagtccatcattgaaatgggccgtgcatgcggagagaatatcctcaagaaaattaatcaggagtggattgagcgaccattgatattcgaaccaaacattgaaatgggcgggacaattcgccccgtgctaaaagaacaatcggaataagcataagaaaactgttaccggtaacatcaggaaaacatttgcaaaagcgctttcaaagtacgacaataaaacttgtaaacagcactgataaaaatttattggaggtcgttatagtgaaaaagatgtggaaaaagctagggttagtttcgttattggctggtgtaacgttaacattggctgcttgtgggagcaagagtgcggatggcggcaatgtgaaaatcacaattctacaaggaaaagtggaatccaacaagcaattcaaagcgattgcgaagaagtatgaaaaagcacatccaaacgtcaagattgaaatcacatcaatcggtggtgggacacagtataatcccgttttgaagacgagaatttcatccgggaatgcacctactatttttagtttagatgggccagcatcggttaaacaattcaagaactacacggctgatttaacggatacaaaagctgctaaggccgctattccaagcacactagatactgttaagtcacaagggaaagtttacggcttgccatttaacattgaaggctatggttttgtttataataaagctgtcttcgaaaaagccggtatcgatccaaagagcttaacgacttacgataaattagaagcagctgttaaaacattaaatgaacaaaaagaacaattaggcattaaaggagtctttgctttacctggtaaggaatcatgggttctttcagatcatttgttgaatgtttatctaagtaaagaatttgatggcaattcacaaaagttgtatacctcaaagaaaatgaagtttgaaaacaatgcagaaatgaaacaaatgattgatttgcaaaaagaatattccgttcaaccagtcatgcaaatggattacgcgggacaagtgaaccaaaactttgctcaaggaaaagttgcgatgattcaacaaggcgactggatttacgaaaccgttaaccaaattgatgcgaaattcgctcaagacgggatcggcatgattccaatgccagttaaggaacaacaaggtaagatgcctgttgggacctcaatctactgggcagttaataaacggaagagtaccgacgaacaaaaagcagctaaggacttcttgaactggctatatacgtctaaagaaggtaaaaaagacgttgttgagaaattacatttcgtacctgcttataaaggttacggtgatgtgaagatgccagatgcactcacacaatcggtctatgattacagtcaaaagaaagcaacattcggctgggttttcccgggttatactggcacatcatgggatccagacgttgcccaacctaacctacaaaaatatctatcaggtgaccaagattggcaaaagactgtttcaaatatgaaggacggttggacaaaacaacaaactaaataaatttattcaattggataaaacaaaaagagggtattgaaatgaaaaataagagtttatcattttggttatttttaacccctacccttgttgcattagcattagtcgttttcattccaatgctggagggcctattctattcattcactgactgggatggactctcttttactaaggtcgttgggtttaaaaactacatggccttattacaagataaagcattcggaaacgccttttggttcacggtagcttttgttatcgtgaccgtcatcttgctaaatgtaattggcttggggttagcattacttgtgacacagaaatttaaaggcaacaatttcttacgagcgatcttctttatgccaaacatgattggtgggttaatcttaggatttatctggcaattcattttcacgcaaggctttagcgctttgggatctgccttacacatgactgccttccaaaactggttaacgaattcactaaccggtttttggggcttggtaattgtgacggtttggcaaatgagtggttacatcatgattatctatattgcttacttgcaaaatattccaagtgaagtgattgaagctgctgaaattgatggtgcatctgcttggcaacgatttacgcggattacattcccaatgatcgcgccagcatttaccgtctgtatgtttttaactctgtcgaatgggtttaaaatctacgatcaaaacttgtcgttgaccaacgggggaccttacaactcgacccaaatgttggcgatggatattgtgaatacagcctataattcgagtgatttcgcactcgctgaagctaaagcaatggtcttcttcttgattgtcgctgcgatttctttagtacaagtcttttataaccgtaaacgggagggcgatttctaatgaataagaaaagaaatagttggatcggcgtcctcggtgtattgattggtcttttatggttattcccattctatatgattctaacgaactcatttaaaacaccaaaaggcatttttgcctcagtattgtcgctgcctaatccattcacgaatgtgaactatggagattcgtttaaagcattgaatttcattagttcattgaccaattcgctcattattacagtctgcagtgtgttgctgattatcctctgttcttcaatggcagcctatgcactgcaacggaataaatcgaagttgagtagtagtttattgctgcttttcatctcagcgatgttgattccattccaatcagttatgattccgttgacggcaaacttcggtaatgtgcatctgttgaatatgtacggcttgatgttcatgtatttaggcttcaactgtagtttatcgattttcctatatcaaggcaccctttcaagtattccgattgcaatggatgaggcggctgaaatggaaggtgccagtcggtggcaaatttattacaagatcatcttaccaatgttgagtccaatgactgtgacggtcgctattttgaacatcattgcgatctggaacgattatcttttaccatcattggtcttaccacaagcgcaatatacgattccactacaaatgtttaatttcttcggagaatacacgaaacaatggcacctcgcattagccggcattaccttgtcgattattccggtcattgtcttctacttattcgctcaaaaatggattatcaaaggtgttacagatggcgccgttaaataattaaggaagtgttaatcgtgaaaaagcacagcgaaacaagacaaacgttattggcagccgggaattggttatggtcgctttttaccatcaaccttgcttggtttggaattaattttcctgtcattctgacactgattttaatgtttagtatgccaaacggccgagtaatgattccgggtgcagttgtgctagtgttaatgctcagtttgtttacactaccaagtttagtcgcggtttttagagcggtggaccaatggcaagttaacggtgatggtaattatgcacgcgttgtgttaaaagggtggcggcaggcactgccagactttttagtgaatctgacgttagcgacggcattgatgatcatcgtgttgttactaaaagccagtgtaggcgatattttagttcgtagcggcttattggtctggtttggggcgttattgctagttgtcgttgccagaagctacttggtcgggttagcgcgccatgatgttaccttaggcggctttatcattgccaatgggggcaaattagtgctagccaccggcgttttcatcttgttgatgggcattaatgtctttttaaaactcgcgtttatgattcttgttgcgagcgtttcgttggcagccttcattagctatcaattattgaacggtgcaccagttaaaaacgaagtaagggagaaatgatcgatggtcgaaattaatttaaatcatatcaataaaaaatattcaggaaatgataccaattctgtcacagatttcaatttgaaaattgcagacggtgaattcatcgtatttgttggaccatcaggctgtggtaaatcgacaactttacgaatgattgcaggtttagaagatatctctgatggggaatttaaaatgggcgaccgagtgatgaacaaggttgcacctaaggatcgagatatctcgatggttttccaaaactatgcgctctatccccatatgacagtcttcgataacatggcgtttggccttaatattcgtaagaatgataagcaagataccaaaaaacgggttgatgccgcagcagaaatcttaggtttatcggagtatttagatcggaagccatcttctctttctggtgggcaacggcaacgagtagctttaggacgagcaattgttcgtgatgctaagttgttcttattggatgaaccattatcgaacttggatgccaagttacgggtgcaaatgcggactgaaattgcgcaattacatcaacgtttaggtcgtaatttcatctatgtgacgcatgatcaagttgaagcgatgacgatggctgatcggattgtcatcatgaacgatggtaaaatccagcaagtcggcaagccaactgaactctataatcatccggttaataagtttgtggcaggctttatcggttcaccagcaacgaatttcttcacggtaaccttaactaatgggcatctagtgaatgacgatggtctaaatatcgcagtgccagaaggtcagttgaaacagcttattgccggtggttacgatggtcaacaagtgatcttggggattcggccggaagatattcacgctgaagaaattgccctccaaacattcccagatgctaaaataacggcagaggttgtcgtttccgagttattaggggctaacacaatgctctactcaaagattggacaaaccgattttatcgctgaagttaattcgcgggattatcatgaacctggtgatcgggttgagatggcgcttgaaatgtctaaagcgcactacttcgacatcgcaacggaagaaacaatctattaagcgctgctaaataggcggaataattttggctgacgtatcggagggaacgaaatggagagaatttttgaagtcgatccgtggcagattgtcacgcatcaactagatcgtaaacataaacggctacaagagagtatgacgagtatcggtaatggttacatggggatgcgcggcgtattcgaagaggattattcaggagacagcctgcctggcatttatctcggtggtgtctggtatccggataaaaccgtcgttggctggtggaaaaatggttatcctgactattttgggaaagtgatcaatgccatcaatttcatcaaaacgaatcttaaaattgatggtcaagcggtggatttaggcaaagatgaagtgaccgcatttaaattggcactcgacatgcataatggggtgttaacccgccaattcatcgttactaaaaataataaacaagtgcaagttacgatagagcggtttgttagtatcgttcaaaaggaattatgcgcattgcgctacactgttgaaaacttggcgagcgaagcagttgagattgagattagttctatgatcgatgctgatgttcaaaatgaggatgcgaattacggtgagcaattctggcaagtgattgagcagtcagacgctgcggatgacacttatttggtcggaaaaacaatgcccaacgatttcggggtaccacggtttagtgtgggggttcaaattgatcatcaaacgacaatgatggcagatactgggcttcaagaagcccaccaagttgggcaacgttttaaacagcaattggcccctaaaacgcaattgaattttgaaaaacgagcggtagtggtgacttctcgagattattcagagttggacttggtaccaaatatgcaacgtatcaagcaggtcgttgcgcaacaaagttaccagcaattattagcggcacagacgaatcaatgggcgaaacggtggcagatggcggacgtggtgattgtcggtgatgatagtgcccaacaggggattcgctttaatttatttcaacttttttcaaccttttatggtgaagatgagcgtctaaatatcggtcctaaaggattcactggcgaaaaatacggtggtgcaacttactgggacacggaaggttttgcaatgccgctttatctctcattggctgatccgaaagtgtcgttgaatctattgaagtatcggcataatcaattgtcgggtgcagaacacaatgcccggcaacaggggttaaaaggcgcgctctatccaatggtgacctttaatgggattgagaaccataatgaatgggaaattacatttgaagaaatccatcgcaatggcacaatcgcctatgcaatttataactacacacgttacaccggcgatgagacttatttgctcaatgaaggtatcgaagtgttaactgagattgcacgcttttgggcagaccgtgtccatttctcacaacgtgcgcagcggtatatgatccacggtgtgacagggcctaatgaatatgaaaacaatattaacaataactggtatacgaatttattggcgcaatggacgcttagttatacgattgaaacgctcaaaaaagtaagcgataccaaaaaagcggatctgagactttcagatgaagaactctcacaatggcaagcgattattgaaaaaatgtacctgccacaagatgaacaactcgggatctttcttcaacaagatggctttttagataaagatatccagcctgtcagtgcaatcccagcagatcaacggcccatcaaccaacattggtcatgggataagattttgcgttcgccgtacattaaacaagccgatgttctacaaggcatttggtattttatggatcgtttttcagctgctgaaaagaagcgtaattttgatttctatgaaacgttgacggttcatgaatcaagtttatcagcggcggtccatgcgattctagcggctgatctgcattacgaagataaagcggtggaaatgtacgcgcggacggcacgcctggatctcgataattacaataatgataccgatgacggattgcacattacgtcgatgacggggagttggttagcgattgtgcaaggttttgcaggcatgcgaattagcgatgaaggacaattatcattcaaaccatttctacccaaaaaatggacggcttatgaattccatattaacttccgcggccggttgttgaaaattagcgtgacggccgaccgaactgatatcaaactactcaagggcgatcgtttggcaattcaagtcaatgatgcgtcgatgatgttggaataggaggttattatggacggtgtcttattcgatttagatggggttattacggatacagcccgatttcattttgcggcgtggcgtcaattggcgcaacaagcgtttggcgtcagcttaccagatagctttgaagctgagttaaaagggattagtcgggaagcatccttgcaacgaattgtggcctttgcccaacttgatggccagtatacggtggcacaactcgcagcactggcgactcaaaaaaatgaaaattacgtggctgctatcaagcaattaacggctgccgatattttaccgggtattcaaccgttgttagtagcattaaaagcgcgcggggtgccaatggtcattgcttctgctagcaaaaatgcgccactcattcttgatcgattagctttatcagcatattttacagcgattgttaatccgaatgacgtgcaccaaggtaaaccagccccggatatcttcatcgcagctgctcagaagattgctgttaatccgcgaaaatgcgttggattagaagattcagtagctggtgtggccgccattaatgctgcaggcgctgtttcggttgcgattggtcatgcgagcgaattatcagcagcggcggttgttgtccctacaacggcggcgttaacggctgatttgttagaacaagcctttgaacagtatcaacactaattaatcagtgcaaccgagccttcgggtgtgtgttggactggtttttttaaggaggagacaaatggatttagcagcgatttatcatcgaccagatagtgagtttgctttcttatatcagccagataggctacgggtacgattgcggacggcaagtaatgacgttgaagcagtgtacctagtgtatggggatccttatatattagtcgatggcagttggcaaccgaaaacgattcggatgcagcaaggcttaataacggatctcgcttgtttttggacgattgaactgaccattgatcgccgccgattagcctatgcttttcaagtgattggtgtggacgggaccagcactttttatggtgatcaggggcctggtccaatcttacctaaaacagatgcttgttttcggatgccctatttccaagaaattgatcgggctaaggtaccagagtgggtcaaacaaacggtttggtatcaggtttttcctgaacgatttgcaaatggtgatccgacaaatgatccagatggaacattaccgtggacaaatgaggcaccacaggctcaagatttctatggcggtgatttacaaggggttattgaccatttagatcatttggtggcgttagggattaatggattgtatctcaatccaattttcatggcgccttcaaatcataaatatgatacgcgtgattatcggatggttgatccacattttggcaatgacgagacgctacggcagctgattactgcttgtcatcaaagagggattaaggtcatgctagatgctgtcttcaaccatctcggcgatcaatcaccacaatggcaagatgtgattcaaaatggcgcggcttcaaggtatgctgattggttccatattcgggattttccagtgcgttatcagccaggtcggaatttcgaagatgctacagacattacatatgatgtctttgccacgacgccacacatgccaaaattaaatacggctaatccagaggtgcaagcttatttgttatcgatagcgcggtattggatcgaagcatttgatattgatgcttggcggttagatgtcgccaatgaagttgatcatcacttttggaaaaagttccgacaggtgtgtgatgctgctaaacctgatttctatattcttggtgaaatttggcattcagcgcagagttggctcagcggtgacgagtttagtgcagtcatgaattacgcctacactgatgcgattttggattattttattcataaaaaaattccgctccaccaaatggtttcgaagctgaatcgacagttaatgctgtaccgggatcaaattaatcaggtgcagtttaatatcctagattcgcacgatacgccgcggttgctaacgatggccaatgacaatcgacgcttgatgcgtcaaacgatggcttttatgtatctacagccgggtgtgccatgcctctattatggagatgagtatggcatgacgggagtggacgatcctgctaatcgtaaatgcatggtgtgggatcccgtggaccaagatcaagccatgtatcagttcgttaagcagctaattgggcttcgccatggtaagcaaaaactattgtcggaaggacagcttgagtggttaattgagccgactcatcccgacgtcttaaaaatgactcggcgattaggtgagcaacaattgacggctgtttttaatgcaggtcaaacagccgttagtgttgcatcaatgaggacaccaattctgtctgaaggggttcagcagcaaacagcagcgaccatcattgaaccagatggctttatgatttattaacatttccaaggcaataaaaaaagattcgctccatatgggcgaatcttttttagttaggctgctcgttttctttggaattttgcaaccagtggtaaaatcacgccgaggcccattaaggcgactgagacgacgatgtttaagattaattcatgtgtatatttggctgtgccaggtgtggcatcttgtgggaagatactgaagatcgttcctaatgctgtaatggctaaacaccagaagccaacgatgatggcccatggtttgtttttaatgtatgtgtattctgatgggaatttttcactattgaaacggacccgtaagaaggcgacaaagatgaaacaagttacaaatggtgagacgataccgttaatatttaacaaccaattgaagatgtcgttaatctcgggcagaaaggcactagatgctaaaacaaaggcacaaatcccagtggtcaaccagtaaccgttgattggaaggccttgtttattggtcttagtcagtgcttttggtaagaattgtttggcagtgtcggataagaaaatccgtgtgccgccatcgagtagcatcgctaattgagcgcccatgtaaatcgcttgggtaacagcgaagatgtagagtaagactttacccatgtggaattgttgcccaagggctaagaaggcgtagtatgaaccgttcatcttcaagtcagctggtaagtggttggcatcgaagaagacgccgattgctaatgagccgaagatggttaggaaggcggtcattagagcgagggccatcatggcttttggaaaatcttttttaccatctttcatttggccaacgtatggtgcaacaagttcggcaccgttcatggcgaaaattaagaggccgatggttgagaagtaatgtaaatcaaattttggaatgaaggtgtgtgcgtttaatggatgggtggcaacgtgaccaccgttcaataaaccaacaaaggtcattaggacaaagaggatggtcatgacaaacatcgcccccccaccaacgatactgagtacctgtagagacgatgtaaacttgtgttggaagaagatgaagaggatggtaattgcggctgttaaaagcgcaaaggaagcccgtgagagcttgtcttcaagatttccgttcccagtaataatccaaaagaaggaaacgaccattgaattagcaacatcgaccaagtatggcaaactcgctacccagtaacaccaagcggttaagtaaccccaaacatcaccgcttgtatggcgcatccaactggaaagaccgccaccgtctttactgaaagcagagcctaagtgaccaaccattaattcataagggaggacataggcgaatagtaagacaatccatgagaagacaactgccatcccttggttttgaaagttataaataatatcgtcaaatccaatgacggtcacaaaatccattaaagcaaggacttgccaggtaatatatttcttttttggttctatttcatccatcgtaaagaaaccccttttctgaaaattcacaatgtttttattataatcaaatcagaaagggaagacaaaacttttttgactgtttcacattgatttttaaagaacgggggaataatcttacaaaattgttattttagcccgttaaaatgtcatctaaaaagcgcgcatgccgttttaatctcttgtaagatagaattatcataaaatctggaggcattattaatggacacaccaacagtcgttagcgtcaaagacgttaaaaaaacatacggtaaaccaaacgaaaaacaatacacagccttaaaaggcgttacttttgatgtgaaacagggcgaatttgtcgggatcatgggggcttctggttcagggaaaaccaccttattgaacattttatcaacccttgacaaaccgactgctggccaagttgaaattaacgggcaagcaattaatgggttgaaagggaatgaattagctgattttcgtgccaaggaaattgggttcatgttccaagacttcaacttattagaaaacttaacggcctatgaaaatatggcattaccattgacgttacaaaatgttggcggtaaaaaagtccgcgatttagtcacatcaatcgccaagacgttatcaatcgatagtttattaaacaaatatccaaccgaattatcaggtggtcaaaaacaacgggtcgccgctgcgcgggctttagtccacaatccagctattttattcggagacgaaccaacgggtgcacttgattcaaagagtgccaaggaattattggatacaatggctcagctgaacgaagaacaacgcgtttcaatcttattggtaacgcatgatccattttcagctagttattgtcaacgaatcttgtttattaaagatggtcaaatcggccaagaactcgttcacggcgataagagtcgggaagccttttatcaagaaattttagatacattaggcacatttaaccattaggaggaagtctaaatatgttattgaagttatcattaaccggcattaaaggccgtttgaaagactatttagtgcttttttccggtctaattatggcaagtgccattttttacatgttcgaagcactggcaactaacaaaagtttcgttacgagtaactcgccaattagcatggcgggcattattttccaaatcgggtctgttttattagggattatcacattagtctacattatttatgcgaataatttcttaatgagcatgcggcgtcgagattacgggatgtttatgatgctcggcgcaaaaggccgcaaaattgcccaactaattgctgctgaaacattagtgattgggacagctgctactctcattggaacggcgctcggggtcggattaacccaaattgttagcaatctgttattgtctcaaatggatattcagattaagcatttttcaccattttacttacctgcagtgttagtaactttgattttcttcattatcttgttcattattgcagcggtagttaatcaattccaacttttgaaaacaccagttttacaactcttacacgatgatcaacaaccaaatcgcgtttcacaaaataaattaagccgtattgtgcaaattgtcttgggcttacttttcttagctgttggttactatatgatgattaaagtcgcaacgttccaaattatgggcttagttgtggcattagtgacaattgtgctcgggacgtacttcttgtttaatgcccttttcggctggttgattacgttgctcaaacgtaacagcaagattcgtaatcgtggtttaaataattttacgttagcgcaattgagcttccgcattaaggattacaccaagatgctcgcattggtggcgatgttatttgcattggcactaggcgcaatcacagttgggattggctatcaaagtgaaattccagaaatggcagaaacaatggcgccttacgacgttgttttaaatcaaccgaaccaagaagcattgcgcctcacaaaagatttaaagggtgtgaaggcgactgctaattacgatgttaaagaagatgcgaaaactgtctactatcggacagcacaacttgaaaagtcaccaatcatggccattcagtttggtaatgggaatggtgtcgcccgcgcaaaaggggttaaaccggtgaaactcagtgagattcaaaacggcgattcttcatccttgcgcgcaattcaagtgccaagtcaatctagtaaggacgttaaagtcgtctctgacgctgaatttaatcaagtggcaggcgcaaccacgcaagttaaaacatatcgggtcaaagactttgcggttaatttacccgttatcaaaaaaattcacgcacaacaagtgattgcaaatcctgaattggctaaaggtcaaggggctacaatggatagtagcaagtatgctaactataagctagcgaacagcatgttcagtgggctcgaatttatgggcttcttcctcgggattgcattcttagcgatgttagcaagttgcttgatgttcaagattttatctggggcagctagtgatgttaaacgctacacaatgttggctaaaatcgggacgcgtcacaatctattgcaacaatccattgccaaagaaattggggtcttattcctcttaccaggtatcgtcggcgtcatccatgtcctctttggtcttcaattgttcaaattgattatgattgatccatataatgatctctggattccattttcaattttcattattctctacgcaatctactacttgctcactacatggctctacaaaggaattgtgttgaaggaagttaaatagtagatggttgaaacagtttaaaacataggaatcagtctaaaaaagccccctttaatctgaacttcgagattaaagggggctttttttagatgaggtcgaagttgtttctctagacgctacttgttacactgatgtcattaagaggcgtataccacgctggattagtttttaacttgcttagctacaattgtggtgagcattttacctacaaaaaaagccaaagaagactgccgaaactgtcatttgaagcgcgtattattattgaacggcatgaattattacctacaaaaaaagctgaacaatcagaataatattgcccagctctatattcaatgaatattcatacatcaattatcgttttgatactattgaagggttaattgattgtaactttcaacagtaacgccttcgtctgttaaaataactttagtaatactaccgttcattggactaacggtaacatcgaattggtcgttaccaaacttgccaacaatactgcgaatggttgtgccatgactgaccatcaagactttatcaccgtcagaacattcagcacgaagttgtttgaaacctttaccgacgcgggcccaatattcagcggcatcttcagcatcgtggaagggatcagcttctttcatgaaatctttagaggcatcgagtgagtatttggtgatgatttcttggaaggttttggcatcatgactggcacctgccatggaccacgctttgggtgaatcttcaccttcaaaatagccgtagaattcttcgcggaagtgcggtgtgatagcatatggagtatcaaggtagaaattcttatggagaataattttagcggtgtccattgcgcgactgcggtcactagaataagcttgagcaaaattaactttcgctaattctttgccagcgcgttcggcatctgcaatccctttcggagtaagtggtgagtctgaccaaccttgcatccggttataacggttaaagaatgtttgaccgtgacgcactaaataaagtgtgattcgtttcatatcgtaaccctccaacaatagcttttagtaccttcattctagcatagataaaaatggtgtgcagggtcattccatattttttgcaaaacggttacatacatttatagtttttaatggtaataataacaattgatttataatcaattgcaattatcattaatagagaataaattttaaaagatactaataaataactttatcaatatttattaatattttaagcataaaccttttgattttatacattttgtgttatttttgactagtaacacttaataaccacatttagtgtttatgtaaaggagtggttcgatgcaaccagaaacggatagtaaccttgttgatcgattcaacgaatggtatctgcaaattggccaaatttacaataagataaatcatttaactgtcacgcacgacttgacatacgatcaatttttgattctcagagaggtcaaattaaaccccaatattgaagtggcgaaattatcggaatcctttgatctttcaggcccagcaatttcacgtaaaattaatgttttattcagaaaacacttaattgttaaaaatcgcagtgatgaaatggaccaacgtaaagtattcatttcattgaatgagcaaggattacgaatggttgatcaattggaagtcgatttctacttattctttaaacattttaaagatgacggcaatgcagacctttctcaattattcgcacaaacaaaccacttattcgatacaatggataaatgggaacctaattcagatattattgattaggtcaaaaaaagccgcgcacaaatttaaatttgtgcgcggctttttttatttaatcgttaaagttgccattttctacgtctttgatgaaagtcttcaagtgatcgaagtaaacgggtgcgttatcaatcatgtgatggtgaccaccatttggcgttgtcactaagcgagcatggggaatcttttcagccatgatcttagcggttgcgattggcatggtttcgtgttcaccaaatgtgattaacgttgggacagtaatcttgtggagttggtcacggaaatgccaatcctttaatttcccagtcacaacgaattcattatcaccttggaagacgccataaacgtcggttgccattgttgggattaaatgtgagattgcaagtggttgtttgcgatcaacgtaaccagcgtttaacttgtcaacaagtgcttggtattcatcgttgtcgtaatcattcttagcttcacagtcttgcatgaatttcaattgttcaggggtcatgatgtcttcacgaattttgttgatgtttgtgacatattcgtcaatttcatcgaccatactcgagatgatggcaccttttaagtgttggccatatttagcagcgtacatttggaccaatgcgccaccccatgattggccgattaagtagaagttgtcgatgcccagtttttgacggacttcttcaacttcatctaagaagtaatcatatgttaataattggtcattgcctggttgtgagtaatcaggttgatcagaataaaatgaaccaagttggtcgtacatgtgtacttgtacaccaagatcagctaattccttaccgaagttttcccagtattcgtgattaccaccagggccaccgtgtaagcagagtaaatgaatgtcgcctgttccttgcgtattagtccataaatggtaaccattatccaatgtgaggattgttgttccttgtttcatatctgcaccatcctttaattatgatagtttcattataaacctattagagagaatgtgcgagggtcaacatgatttagttgagcgtttctaattggcgtcgaatggcaggaacagcctgtttattccccgttagaatgaggtgatcattgagatggatttgcgtgtcaccatgcggcatgatcagttgcttatcgcggtaaattcgactaattgtgacttggtccacaaatgggagattagaaagttgaatcccggtgaagcgccgatttttaaccgtgacttcgaagagcccggcatcagtgttatcaatgatttgtaaggtagatggagtctcgattaaacttcgcaacagactgatatttgcttcgtaagtgttaaaaatttcaacgccatgttctttaagttcatcgtattgatcgtccgagatattcttaaattcaaagcgggcgatgatccgcggtactttggcctgaatcgcttgttgggcaagttgataattttgctcattatttaaatagcctaagaccaggatatctgtatcgaagacggccgcgtcagttaaggtggctggtgccaagtcaggcaagagttcgaggttggcttggctatggtagatttgataattttgttcgttattggtaaataattcgcttgtgtacagacctttggataactgttgggcgattggaattgtcatgatgttggcgccgatgaagttaacacgtttgcgtggcatctcttcaggcgttggtaagtagaatcgattgaacagaatcggaccaagaatacagctaatcaccgctgcaattgtgaaagcgccggattgctgtgtcgtgataaccttcaagttgagaccgaccgtcaaaatgggtaagaccaacgtgatggtcgtcgaactgaggaaagtcccggcgagggcgttggtgactttgaagcgccgttttaagacgaagtaaatcaaaactttggcgcccatgaaactgatgaagaaaaagggaatcagggtcagtgatttaggatcacgtaagagcgcggggatgttgagttttgcaccggtcataatgaagaagatgggaatgaaaaagccgtagccgattgatgttaatttatcttgcgtctcttcacgggggcgtaaaagtttcatgaccatgccggctaagaaagcgcccaaaatactttcggcaccgacttcttcggcaatcgatacaagtgtgatgattaagaaaaaggctaaacgaatatcgagttgagtcgttgacttatcaatccgctcaaagaagtgataaacagttttaaaacgcatcaataagaagatcgcggctaagaaaattagtgatagtaaccacagactcttagaaccaggattattgagggcggcataaattgttaacgaaatcagcgggacgatttccccgaggacggcaattaacagaattgtttggccaagcggctggctgaggagttctttttctttcaacgcggcgatgacgacccctaacgcgatggttgaaaagagaattgttgcgagtccaatatcggtgaacaacccactccatgccaataaactggcgagtcctagcgaacttaataggatcagcgtaaaactaccgactgccagttgtaagggcgtcagcggtgttttaacgccagatttagctgtggtgggttgctttttaaagagttcaaagtcgatttccatcccgcttaagaaaattaagacggtcacacccaatgatgaaagttccgtcagtgtgggggtggttgagatgaggtggaagccactttgtccgagtaaaatcccgaccaaaatttccgcaacggcggttggtaaataagaaatcttaaattttgccatgagtaacggcgtcattaaagccgccaatagaacgattacgagcgctaagcttgtcataaaaaagatcctttcaatgctcaataaagttgtgtagagcatacactaacctactaaagcatgtcaaagccgaatagcttccgagcaacagcacgggttcgtaaataggcggtgtagccgactgtttgcgggccacagctgtgcacaggaagttggctttgatagctagatgggtactaaagcatgtcaaagccgaatagcttccgagcaacagcacgggttcgtaaaattggctttttatatattggcgctaatattatcgattttgttgataattcgttagtgattaaattattattaaaaagttggcattatcgctagttaatatctacaactaatttacaattggtaataacttctgtaaaatagatgctacgatattaaaaaggggggcgatctaaaatgaagataaaagaaagtctcgcggttggaatttttgccttttttggcgggattttacgctatgcaattgggctcggattgcaccaagcagcggggtttccgtatggcactttgtgtgtgaatttaatcggggcgttttgtcttccttttttaatgcgttacatcgtggttcgttatcagattagcgatacgctggcacttgcaatgggcacgggctttttcggagccttcacgactttttctagttttagcgtggatgcattgaagttattggtggccaatcaatggtggccatttagcctgtatatcgggattagtttgattggcggtgtctgcttaagtttagtggcagattactgggcagtttggctgctcgatcggcaaggaaagtcgcaggtgctaaaatgatgacgttattaattgtcggattgggcgcggcaatcggcgctattttgcggtatcaattaacccgtcttggaacgcagattgccagcgaatatccattaatcacctttttaattaatttaacggggagcttttgcttaggttgggtgaccggggcacaattggatcaaacgtggacgccctttttgggcgtcggggtcttgggtggctacacgactttctcaacgttcaatagcgaattgagtcagctgtggtttcgccgccgttaccatattttctttggttatctgctattaacctacgggttagggctggtggttgcagcggccggcttttttgtaggaagatcgtgaaacgtgctttagcaaataactttttccgcttagctacatcaggaaaacaatcgactacatcgcttatttccctgattaggctaatgctcgaaagttaaaccgtttcaaacgcactctaaacgtgctccgataggcatatttctacgcttaaccaaatttaccgaaccgacgattgcatcgccaattcggtaaatccagttaatgctcaaaatataagcgcctatcgtcgcactcttgtgaatttagtgttaaacttgtagaactgtttatttagaaatcgggggacatctgctttgactgacgaacaaaaatcattagaacaacgccgtttaaccgagattgtcggtttaattaaaaacgccgaaaagcacttcgaaggcgccgttgaacgggctaaatcagaagaaaaagaaattaacgcaaacttctttaatgatgtacggttgaatttcaataatgattcagcaatgactgaaacggcagtctcaatcgaacaacaacggcaaatgttgcaagaacggaataattcttggcaacaatcttcccggcaacttgagactttacaaaaaatggaaaaaaccccttatttcgcgcggattgattttaaagaaaagggtgaaccaaagtctgagtccatttatattgggctagggtcattcaccgatcgcgaagatcatttcttgatttatgactggcgggcacctatttcatcaatttactatgaagggaagactggtgaagttacgtaccaaacgcctgacggcccgcaagacgtcaatatttctttgaaacgtcaattcttaattgaagatggccaaattaaggcgttatttgatacgcaagaaacaattggtgaccaaatgttactggaagtattgggcgaaaagtctgatacacaaatgaagagtatcgtgacgaccattcaacgggaacaaaatcaaatcatccggaacactgacgcggacttattgttcgtgcaaggggccgctggttctgggaaaacatccgcgattttacaacggattgccttcctactttaccggtatcggggtaacctggattccagtcaagtgatcatgttctcgccgaaccaattgttcaacgattatatcgctgacgtgttgcctgaacttggcgaacaaaacatgattcaaatgacttactatcaatatgttgcacggcgtttgccgaaccttgctgttcagagtttatttgaccaattcgaaacaccaatcacggaaactgatgcgcggattagccgtttgaaagaaagcctagtcttctataaagcagttaaacgttacgcagcgcatcttgaaaaaggtgatatgcgcttccgtgacttgaaagtgaacgggaaggtcttgattagtaaggaaaaaatcagcgacgtctattaccgtttcaacgaaaactatcacttaggaaaccggctagacgcgacgaaggaaagtttattgcgcagtttgagccacaaagtcgaccatgaaacgaaggctgactgggtgacagaacgcgctgaaaacttaagtgatgaggaactccgcgaaattatggcgggtaaggactttaagactggtgaagcggaaagtaaatatatcgctaagcaaatcgttttgaaggctttcaaacccgttcaaaaaggaattcaacgcaatcgcttcttgagtattcaagcacaatacgtccacttcatgcgggttgtgccgcaattggttgatttggctgaatttgatctgacaccagaaatctggaatgatcatgtgactgattttgtcgctaatttaaaggccaaacaaatgacgttatcagatgtgacaccttacttgcatctttatgatttaatgaccggtaagcacggcgaacgcgacatgcgctttgtctttatcgatgaaatccaagattacacaccatacgaattggccttcttgaagatgcacttccctaaggcgcgcttcacgttactcggtgatttgaaccaagcgattttcaccaaagaaaacagcacgaacctattacaacaagtgcaacaactctttgatgcgcaaaatacgaaggtcgttcaattgacgcgttcatatcggtcaactgaacaagtcaccgactttaccaaagggctcttaaagggcggtcaaaaaattgaagctttcaaccgtgaaggcgacaagccaaacttgattgtgcgtcaaagcgaagatcaattggtcgctgatgtgaatgcgcaactcgctaaaaatgaagcagataagttaacgacggcgattatcaccaagacattggtgcaagcccaagaactaacagctaagttgaaagccagtggcacaaaagtcactttaattcgttccgaaaatcaacgtttggcagcgggtacgttagtcgttccaagtttcttagccaaagggttggaattcgatgcgattatcggctggcaagtcagtgcaaccaactacaatcatgaagatcaacggcaattgctctacacgatctgttcgagagcgatgcatcgcctcactttattagcaacaggtggcatgtcaccattgattgataatgtggatgcggatgattacacgttaattaaatggcagattgcaagaaataacttgaacgaatttaatgacgtaaattaagcaagaagatctcgattggtgtatgccaattaagacatttaagtggccgtgaattcaaataccaattaatttgaaccaattggtgatcacttagttcttcaatggcttggcctttgggaataaagcgccgcaaaactcggttacggttctcattactgcctctttcatgcggtgaataggcatgggcaaaataaacctgtgtaccagttcgccgttcaattgtctgatagttagcgaactctttaccatgatctacggtaagcgtcttgagcttgtcttgaagttgactagctagttcaagtacggcttgagtcatggactgactgtcgcgaccatggagccgtttaacaattgtcaggcgactcttacgctccacaaaagtagccacagcttgacctttacgtttaccagaaagtacggtatcagcttcaaagtggccgaattcctggcgagtttcgactttatgaggccgctcctcaatggagcggccgtgattgaacgtaccacgcttttctttagcacgatgacgacgaattccatgatcaggcaaatcgggcaactgtatatcaagccatccttgatcaatccagttatagaccgtcttgtaggcaatccccaccacatgggcaacttgttcaggggaccacttctggacttgaatcttttcctcgatcaagtgtttaaggtttttagtgagcgaagacttccgcccccgttgactaacctttcgttcaaagtcagtttgcgctagcccagcctggtactcactatttagccggtgaagttcgttaaagatggtggtcttactaaagcctaagtagttagcgatgtatcgcaaggaacgtccttcattatgaagcgtttcaatgacaacacggttctggaatgataaaatagtggtgctcatcaaggtccttctttctaatggattgtgtggtaacaccattaaagaccttgatgggtttttctgtccacttaaatgttcaacttaaattttacaatctgccaaatagaaaaaacgcgcgctgaaaggcgggcgttttttgattggatgaaaagtgtaatcgcgaaaaaatggacaatgaatattttaataaagcgcttttaattattaaaatgtttatgatagattgtaaaattaatccgaacgctgttcggacaaaaaagatcagcttcctttaaaatggtgtttaccacaaacccatcttttaggagctgatcttttgtctagtataacctattccgaacgaattaaaatcgaaaccttttgtgaactagggctgtccaatatccaaatgggcgttcggatgaaccgatcaccgtcaacaatttcttatgaattatctcgatgtcaaccttatcaggctgaattagcacaaacagatgccgaatacaagcgatcacgatgtggtcggaaaactaagctgagcgatgagttaaagcaaaaaattctcaaccatttacgtctaagctggtcaccaggaatgattgctcacgaatttaaactagctactaaatctatttataattggctaaatcaggggagaattggtttctccttgaatgatctacctgaacatggcgtacgccaacggcgtaacgttgaccaacgatccaaatataatcaatctttggggcgatcaattgaacagcgtcccatgatgattaatcaacgtaagcgcatcggcgattttgaactagatacagtcgttggtcctcgtgggcatagtaaggcagttttattaactttaatcgatcgcaaatcacggttcctttgggcataccggttaaaagatcggacgacagcgactgttaatgaagcactaactaagttcctaaccacttttaatggtccggtgcacagctttactgtggaccgtggcactgagtttagtgggctagtatcacttgaatcacaatatggtattaagacctattactgccatgcttatacgccagctgaacgtggtagtaatgaacgctttaatcggaatttacgttatttttatcctaaagggactcgttttgagcacattagtgctcaagatttaacgacgacgttactccaaattaaccagcgaccgcttaaaatactcgactggcaaacaccgtatcaggttatgctgacaaattcgtccaaaaattcggattaaatttgcaatctaccttatttataaatttaatggattttaaagcgggctaataattatttagcccgcttttttgcgtcttatcgctttcttagcttatggattacttattaattgccaaacaaaatattgtacattgaccgattctattcgttaaagtttatatataaataatgtccattattacattatttatacttacttataattcgatcgtcccccttagactgatgctgggatggcaattatcgatactaaagtatttttatgaggagtgtatgatgcaaagattaaagtatttttacaggcgacatgccttaacagtaaccctattattttttggactattaagtattgcgatggttgcaatcgtctatttacagcccaataaaatcctgtctggttctgactatcatttccacatgaaccgcattgagaatttggcactttcgattaaacagggagagtggtttccgagaattagttactttttcatcggcggaatgggctatgcggcaggtcttttttacccagatgcttttctctacttaccagctattctgagagtagtaggactatcaatcaaagaaagttttattgtatttgcaattgcgattaattttagtacgtttttaatcacatatatttcaggaaagttagcggattttaataagaagcaagcattaatattctctttgatgtacggtcttagtatttatcgttttgcagatttagttaatcggcaagccattggtgaagtgatcgcgctcacctttttcccattaatgattgtgatgctaacgcggttaaaaaaaggtgagcaccggtattggtatctgttatcaatagggatggcaactattggttatagtcatatgatttctgttgaaatgatgggcattgtcatcattatttataccttattaaatctcaagggattctaccaaaataaaagtttaaagtatctcattgctgctggcttattagcaatcggtttattagggcgttatttcttagcggttggaaaacaaatggcaaccacgacttttcaagtaaccgcacaacccctagcatttttatctgaccgcacattaccctttaaagacattgttgttaattcattaacgaatgctgtttttcatgcgaatactgtgaatgtcggtatcacgattctactcggattaggcatcgcgtgtggtctattttactattccaaaaacgaccgtgatttaattgggattgcgttggggctattcatagctgcgacgccgattatgccttggcatttgttggatcatacaattatcaatacgattcagttcccgtggcgtttttttgccattattacggcaattgtgagttatttagttgctaaggatgaatgtcatttattaaagaataagtactacttttatctgctaattctgttgttgggcgcaggaaatgtcatctactctacgaatagtattcaaagccaaagttggcgctttagaacgaatgctgcctataacacgcccaacccttattacattggggccggacatgagtatttacctgctcaaaccgactaccagaaaattttgcgacataaaagacaggtcgttaagtatcagccgcataaaataaaaattacaaatgtacggcatacatggggccgttatcagtttgatttcaggacactgacggatcaaaaagcagttgttgaagtcccctttatttattacaaagggtacgttgccgaactcaaccatcatcagcgattaccaatgcagatgaataaacgaactgggttaacacaagttgcgttgaagggaactggtagaatcaccgtttattatcgaacaactacgattcagagaatagggacggtgattagtttgcttaactttgggatgctgatcataatcattcataaagaaaaaaggcgagctactaaatagcgcttattcacggtactagactaatcctcgaaatataatcgcaagatgacgcactctgtttttaatgttaaaatggatgcgtttagtattggaggattgtcggatgaagaacgagatgaaatattatgaaatctcgcgtgatgagtggcgggtttttcatggccgcggtgacgcgtatactggcatcacggacacggagctggaacagattcggggattgaatgatcggatttcacttgcggatgtgagtgatatttatttgccattacggcatctgatacagatgcactatgaacagtaccagatgcgccaggccgaaaaatctgaatttctagagattaagccacataggacaccatttatcattggcatcgctgggagcgtcgcggtcggcaagagtacgacggcgcgcttgttgcaactccttctcagccgggcctacccggataagaaggttcaaatgattacgactgatgggttcttatatccgacagccacgctgaaacaaaaaggaattcttgataaaaaaggctttcccgaaagttatgatatgccgcatctaattcaatttatgaatgcggtcaaaaataatgttggaccagtcaaagcaccgaaatattcacatcagatttacgacattgtgcccgacgagttcgacgtgattgacgatccagatattttaattgttgaaggaattaacgtactacagttgccatcaactgagcagatttacgtcagtgacttcttcgacttttcaatttatgtcgatgcgcaagccgacttaatcaagaagtggttccttgaacgtttcgatctattactcgatttagccaaagatgatccgaccaactactattatccatacgccatcagtgaccgacaaagtgcattcaagatggcgcggcgggtatggcgtgacattaatttacaaaatttaaacgaatatatcttaccaacgcgtaatcgtgccgatgtcattttgcataaaacgaaacatcacgtgattgataaggtattcctacgtaaatattaataatagaatgagttttttcacaggaaggccgtcaatccattgacgttttcattattaatcagtaaaatagatacattatagtttgacttagtgttatgaatctagcaatttggtgttacttgttcacaccaaattgctttttaaaaagaggagtgagttgtttggtccaaaaggacatgcaagatttcgataagattatcgtattagattacggtagtcagtataatcaattgattacacgtcgtatccgtgaattcgggattttctctgaattgttgcccaacacgacaacagcagcagaaatcaagaagatcgcccctaagggaattattttctctggtggcccaatgagtgtttacgatgatggtgccttttcagttgaccccgaaatttttgaactagggattccaattctcgggatttgttacgggatgcagttgatcagttttaaaaacggcgggaatgttgaagcatcaacagaacgtgaatatggtaaggctgaaattacagtcactgacaaagacagtgacttattcaaaggccttcctgaaaaacaaacggtgtggatgagtcatggcgacaaagtcacagcgattccagaaggtttcgtaacggttgctgaaagtgataatacacctttcaccgccatcgaaaaccgtgaacgtcggatttatgggattcaattccataccgaagtgcggaatactgaattcgggaacgatattttgaagaactttgcatttggtgtctgtggtgcccaagacaactggacaatgaacgacttcatcgacatgcaaatcgctaagattcgtgaacaagtcggtgacaagaaagtccttcttggtctttcaggtggcgttgattcatctgtcgttggtgtgttattacaccgcgcaatcggcgaccaattggtcagcatctttgttgaccacggcttactccgtaaaggcgaagttgaacaagtgatggaaagtcttggcggtaaatttggtttgaacatcatccaagttgacgctaaagaccgtttcatgagtaaactcgctggcgtttctgatccagaaaagaaacggaagattattggtaacgaatttatccaagtgttcgacgaagaagcaactaagttaaacgggattgacttcttagcgcaagggactttatacactgacattattgaaagtggtacaagtactgcgacaaccatcaaatcacatcataacgttggtggtttaccagaagacatgcaatttagcttaattgaacctttaaatacattatttaaagatgaagttcgtgaccttggcgaaaaattaggcatgccatatgaactcgtatggcgccaaccattcccaggtcctggccttgggattcgggtccttggcgaagtcactgaagacaaattaaagattgtccgtgatagtgatttaattctccgtgaagaatttgcactcgctggcttagataaaactgtatggcaatacttcacagtcttaccaggcatccgtagtgtgggtgtcatgggtgatggccggacatacgactacacagttgggattcgtgccgttaactcaatcgacggcatgacagccgacttctcacggattccatgggatatcttgcaaaaggtttctgtgcgaatcgttaatgaagtcgatcacgtcaaccgcatcgtgtacgatattacgagcaagccaccttcaacagtggaatgggaataaaatcctaatcaaaacaccgcaagtcgtttcgacgacttacggtgttttttttgtgcaatcaatttaggcttttaacggtacttctttgaaatcagacgcaatataaggtaccatctaatcaatgaaagtagggatgattgatgacaaatgggcaacaattagcgaccagtgaaaaaattaaacaagggattgtctttgcggtggcgaagttaattcaaattctccctttaattggcttaaccatgattcatagcgggcagtcagtggcgtcttatatgccgtatatcttattctataccgcgttgaaaactggcttattattcgtgaatagtctaggccacgtgcagaattcatttaaaataactagtatcagtatgctgctagctgctggcgccttattgctattggctatttcgccttggctgtatttaacggacatggcggcctttatcctgggcgccagtgccagtgtgatcatgccaacctatgagagcgtttattatcacgagcgggtggtttggaaatggcaccttatgggcactgaaattaaaacgttattggcttttagcctaataacggttggtctgttgaccatcgctagtcatttttcatatcggttagtctttattgttatcatgctatttgtattgattggctttatcggtatgcaacgcttcgaaccgtttgtgaagcaacttgatgaatcggtgttcgtcgaacaaaccaaatcgcttaataacttggaactatttgtctgggcaaccgcgatggcgtttgcgctaagatatctgcgcctttttgaagctaaatttgtctggttattaatcacagtcgctgtcattgggttagtcgcgctaatcttgcgggtgatcatcacgcgcggcactaaaacgaagatgccgggttggcttttggttgcggctttaattaacggggcgtttgaaacattcttaatgctctatatttttgtcgcaattcaaaatcagagtttgatgataggcgcctacgtgacttacggtgcagggatgattttagcccaagttattagaaagagcgtgcaagggcgcttttcgaagttatcagacttaaaagtccaattactaggatttgttgctggtgcgtggttgatgattacgccacatctaattttattaggcatcttattgattagtttctttggcagtgccaacagcattcttttaaatcatcgcgcttattacaccggcgtcacgacgccggcccaaaccttaattattaaatatcggaatacgtatctcggtagtatcctaatgcaatttatcttgatcaccggcttgatgggcctagccgtaatgcggcaacaagacataacggccgtgattgcccaaatcagtggcagcgtcgcaatgtctgacacaaccagtcagttgattcacttggccggcctgattagcgttggcttgctaacggtaattgccggattggctggcagatacttgccggcggtggatgaaaatccgctgatttaaaagtaaaaaaataacggtccctaaatggggccgttatttttgtggtttttgaggattatgttattacttatatggatcttttttggggatgaaaagtgtaaaatgagtagagaggtgccttctagtggttcaatagttaattaaacgaatatgaatgatctaaaagtatgtccggattctaaaggactgcttaaaaatcaacattcttggttatgaggattgagagatatgttaaagagtaagtaactataaaattcattgtaattatgaactatttaaaagatactacacaatgtagttttggtaaaataaaaaatatagattaggaaattgtaggctttaacatagagtgaggtcattttttaagtgaaaaacatttcatactaaataaaataatattaaaaatataattggggaatttaaaatgcgatctagtagaaaaaagattattgatatgtcatccgtggaagcacggctcctatgtcaagaatccggacataaaagtacgaacaaatttgactttcaatttaaattacttaatttaattttcggaggccgaagttttagtcccgttcagattttaaaaacgctttagagtatattaaataagccccaacattattgaatttaatagcctgtagctacgctacaagtgaaatacgatcactgttataccaacgaatatagttatcaattccggcgattgcttcatgaattgtcttaaaatcttggaaattaacgtattcacgtttcaaaattgaatgaaaactttcaattcgcgcattatcgccgggctgaccctttcgggagtaagaatgcttgataccatacttcgataaagtgttttcaaataagtcacttgtgtattggcttcccatatcactatgaataatttgtggtttaactgcttgcgccatgacttgggtaataacgttagtcgctagttctttagtcatctgcgtattaagttggtaagcaataacccgtcgggttactggattatagacactagctaggtaacaccaagtatggttaaggggaatgtacgtaatatcagtcaataaaataccagattgatcagttaactgcttaatcaagtttggtcgctgatcagaatcagtctgagtggttggcttattgattcgtttaaccattctagatctaatccctaattcacacatttgttgatagaccagacgctgactaacgtgaatatcagactgttgatttagtaagatcgttaatcgtgggtagccatacattggatatcttaaccaagccgttaacacttcttgtttaattaaatgccggcggcgttcagttctacttggctgccaatgtagataatcatagtaggttgagcgcggaattttgagtactgataagatacgcgtaatgcggtgcccagcaagtaaattagcgttgacgacttctaacacgagggcacgccctttaataattagctttttgccatgagcaccgccgctcgttttaaaatatcaagttcttcttttaaccgtttattttctttaatcagagcacgttcatttgatgatagcactttagtgttgttaggatcagcttgtttaatccacttagtgaccgttgaaacactgacgttgtattctttagccagtgagttggccgaacggccagtctgacttaagctaacaatcgattctttaaattcatttgaatatttaattgccataataaaaagctcctttatgatgtattatatcgaacagtttgtccgtaattccatcataggagccttttgcgtagttataaatacagtaataacaatgcattcacgtattatatagccacaaaaaactgtgtatataaccacaaaaaactgtgtatatagccacaaaaaaataaaataagtggctatataatgttataataaaagcataaagaaattcccgtctaaaagtttttctttatgcttatccaacaacacacccaaaggagtgtatttatatgactattataccagaatcaaagacaaggcaggtacagaccttgaatgaattatcaaaaagaaaagtcgttgaacataatagtttaatcacatccattgccaagatggataagacaccactcaaaatgtttgaactagcggtgtttttaattgataccgacaatccacctcaggatcagacggtttatttatcaaagaaagaaatgtttgctttctttaaagtggatgacaacgataagcatagtcgttttaaagaggcaattgaaaaaatgcaaaaacaggctttttttcagattaaaaaagaacaagataaaggttttaagtttgttagcattgtgccaattccatatgtagaatggacagattatcatgatgaggtattaattcgatttagtcctgaaattatgccctatttaattaatctcaaaaccaattttacacaacatgccttgtcagaaatttccgaattgaatagtaaatatgccgttattttgtatcgttggttatcgatgaattacaaccaatacgagcactatagtgttaaaggtggacgccgagaagaacaaattgacaggtaccgtaatcctgaaattggtatgaaagagttacgagaaatgactgatacgataacagaatacaaacgattcactcactttgaaacgagagtattgaaagaacctctagcagaaatcacaaatcataccagctttaatgttatatatgaaaaagttaaaaaaggacgcagcattgatagtatcgtctttcatatcactaaaaagcaggtggcagatgatattagttacaagttagatgatccaacttatattgacggtaagataaggcaagaagaaagtgaaaaagacctcgtatatgaagctatgaaaagtccatatacaaaattgctgatggaacatttcttgttgtcatatattgatttgacggatacggctattttgtcagggttacagaaaaatgtttatccactttatgacaaattaaaagagttacgtggtttaaagggcgtgaaagaacacttagcatatattcgagataaacaagatgactattctaaaaagaatattgctaagtatcttaaaaaatcgattggacagtatctaccaatcgttaaaaggcaggatatagatcatgagtgaaaatttaaaaacaatccgagaacttgctgaagagttagatgtgtctaaacaagccattcaatatcatattaaatcactgacaaataaaagtagacaaaaaaatgatagaggaattgttgttttgtctatcgaagaacagcgatttataaggtctaaggtagacaaacaaacaaacaaaaaactatcaaaaaaacagacaaataagagacaaacagacaaacaaaaatcatgggatatcaaccaatatttattaaatgaaatcgaagaagttaaaaaaatagagacgaacaactagcagtcaaagaacgacaattagaaaatagagatttgcaaatatctcaaatgcaaaacttgttagaccaacaacagagactagcgctgcaagataaaaaattgttagaagaatacaaatctgaaatcaaagacctgaaatcattgactacacaatcaaaaccttttgtaaaagaagaagttaatgatcataatgatttagaagagagcgccactcaggaccaaaataaatctaaaaaatggtggccatttagcaaacgaggacgagaaaatgattgattcaaaaattatggagaaaacaggggccattttgaaagattttggtaatacctatttttcagataatggcactttaaagcgccacaaagtacatagaagaccttgatacttatacacctatgttgatgaaagcattgcatttaagtttatggtgtatcatggtgttatacaaattaaaattataggtagtttagaatgaaaaaaatttattttttatgtacagggcaaattacaagtttaatccgaacaagcccggaatctttcaatggcagtctgttgatgatgtatttttaatggtcgttgattaattagttcaagtgctgctaggatctcatcagtcgttacttggctaaaattggtctttttcgggaagaaccagcgtaaccgtctattaaaatattcattggaacctcgctcccatggtgaatatggatggcaaaaataaactttgatctgataatcctgttctaaggcctgataattggcaaactctttaccatgatcaacagtaatggattttacttggggaccgaaggcccccataaacttgccaaaggcggtgtttagagccttagccgttctattaggggctttgatggcccatagaagtcgggtcttacgttctacgaatgtaaccagacatgatcgtgactcacttcgactagaaagcaccgtatctacttcccaatgaccaaaagctaaccgttgattaacagttgttggccgttgttcgatggaagtcccacttgtaaatttcccacgattttcgctcactcggtgctggcggacattccgattgggtagatcagtcaatttgaaggggagccagccacgattaagccaattataaattgacgcagtgctcaagttataagcggtcgcaatggtttctggtgaccaggttaatcgtaagtgattggtaattaaagtcgctaatgctgccgtcagcatcgaacgacgaccgcaattccgccttttgcgatctgcatcttgctgagctaattctggatcataaggtttaacccggtccaactcatagctaatcgtagctttggcgacgcctaaggcgtcagccattacttggtaagatttattcccctcattgaccagttgtgctagtgcgccacgttgaaaacgtgataaagtagatgtacccaaagtaatcactccctatattggttggaattagctactaccattgtaagtgattgctttgggctttttaatttctgttcggattaattatagaatttgccaaattaaaaaaaaactaaaagcgctagttgtagtattcattaaacacttatttccaagctcttttctatggatgaaaccaatttctgtgtatagtatccttctctaacccgatgttgctgaagcttaacttcattttgcaatgtttcatatttagaacgggaaatcgttaaaagttctccgtggagatcttcaagatcacttattgtaatcccgcaaccattaaatttgagccactttcccacattagacattttatcagccacgggaataatgccagcagcaaggtaaaggctcaatttatactgccaattatatttttcataagatttaaaagtaggtttatgatactatttcttagttaaaatatgagtctagtgactatcggttgaaactaaagcaacttttttgacaacgcttaccaacatgctgtaatcttatttaatatataacaaataaacttatgctaagaagtggtgtcggaatattgatattgctacttaagagattaacttggactttaactttacgattaattgactaaaaaatttacttaattgtaaataatggaggttattgaaatgccttggaatgaacaaaattacccaccatcaatgaaaaatttgaaaaaagtggttcgaaaaaaagctattgagatcgcaaatgcgcttaaagaaaaaaattatgacgataagcgggccatttcaattgctacggaacaagcggaaaaatggtatcaacatcgctctgatttaaaagacgacactccattcaagaagaatttaaggaggcatagctaatgatatcacttttggaaaaacacccaaacaaaattactcctcatataccaatagaaaagcctaaaaagcaattaccacaaagatttccagtaaagactccgcctgaaaatccccaaataaatccagaaaaaatataccctgaaaaacaacctgaagagccggttaggcgtgattaataagccgtttatgttagattacaaattccaatttgaagggggccacataaatcagagtgaattcccatgaggcatactaaatacaatattggagactacgttttaaattgcaaataattcggattaaatttgtaatctacctatagtcaaaataaagccagcgaaagcgaggaggacgtcatgaaacaatacacgaaatttttactgatgattcttgtctctacagttattatgtatgggttaatgtaccttaatgtgttccaattagatcatatttttctaagccaaacgcgactgtatatggcgctaattatgggcgccaccatggccattgtaatgctgttattcatgtggtcaatgtaccagaataaacgtttgaaccgcctgatcctacttggtagtgcggtgatatttgctggctcgctttatctagttcgtagccaagcgaccgtgcacgatgcagcttggatgcaagaaatgatcccccatcactcgaccgcgattctaaccagtgaacgcgcgcaactcagcgatccggaagtcaaagccctcgcacagaagatcgctaaaacgcaacgtgaagagatcacggagatgaaacgattattgaaaaaagttgccgatcaatagctgataaaaaataaggaagttgaccaatcaggccaacttccttattttttaggcttacgcaaattgcaatagtaagttagccagtgccgataaagcacacagacgaaagggctcatgggagttccaggtggatcaggattaggcggcgcggcctttgcgcgcacgtgataattcctttcgaaatatttcagctggtgtacagaacttaagtaagcggcgcgggagatggttgagccaagattcagcttgacgggccagactgggtgtagctagatcgagtgattgccccttaggaaagtaacgtctgagtatacgattgtggacctcattagtggcgcgttcggccgagctataagggtgggcataataagtctcggcaacaccctcaagcgcagccgttagcgtggtgaactctgttccgttatccgccgtaactgtccgcataacgtcaccgaattcagccgtaatattttgcatggcataagccacagattcagcgtctttaccctcgatcaagcggacaatctcatagcgcgttttacgttcggtaaacgttaataggacactctcgctaccagcacgtttgccaatgacagtatcgatctcaaaatgaccaaactcgtggcgcgtttctactcgctttggccgttcttcaatactacgaccgagtaggcgctgatgttggtgcgagtggtgctgggtcgtccggcgttttgttttttccagcagatcaaggttacggatctccaatagttgcgcatcgatatagttgtacaaagtcttcgtacagaccattttggccggcttaaataaccggtgcttacgggcataaccaacagcagcgtccggcgaccagccctcatggcagaacttatcatcaaagtaggctaagaaggccgtcacttggataaattttaatggacgtccacagttttgccgctttatttcatagcgattctgagcggcttcagggctgtaaatttcaaagtagtgtttctgattattaacgcgtttaacttgcgtgactcgaccacgcttgagctcattattgacggtctggtggcagacgcctaatcgaatcgctatttgccgtgctgagcatccttcaatgtgccaagcggcgatttgaccgcgttcgatttccgataaatggtgaccttttgggcgtggctaacttaattataaaacgcgcgccccttcgataactaatggttttctaatatttgtggtagtaatagtatagctcaaatttaacgcaatttcagtttccgcgcaaataatcgtctcaaaaattatcattcttgacatgcgacgcgttatttgacgttagtcatggtttaaacgtgcttattagttggtttgttattcgtccgccgatgtgcgtcctaacgtgccaacacgtgtgtacgccgatttcagtatattcaagcattaaaatgtggtgtcgcagccagctggagtgcaagttgggttgcacgttcgagcgaatcgtttgtttgttgttcccagcgggccgcgagtgtgttggccgggtcgtgcagactagttaagatatgttgggcgacttgcaacgcgtgtggttgatgtaaactggtagccatagtttgtagcgcgtcagctagttgttcgccttcagttagctgtcgagtcacttgcatgggggtttcgatggcaacttgttcgttggcgcgctgacccgcctgaatccaattatccgtactagctggcactggtaaccagagcatcagtaaaacgaaccacgttaagcaggtcagttgggacagatcaacgcccgcaccggcccatgggttcaggtctaagttacgtaattccaagtattgaatcccatcctgacatagttgtgaatgaccaccggcatgacgcaatcgaacctgaccgtaaaattccttggtcgcacttaattttccattatcaacggccgcttgcagtgtttgacaatagtcatttaacgacgcgtacgagaccgtaacacccggccgattggtatacccgctagaactgttgcgtaagcttcgaacgggctgggctggtggcgtaagaccagactgtggccagcagcgtggtgagcagccataaagatacgtcagtagccagcgatagtgcaaataattctgcgcaatgtgcaggtaacagcgattttgaaaggtagtgaaatcacgactatctgtctgggcctgatacaatcccatcatcagactagccgctaagcttacatttacagtgaacacctgacaacatttgacgtcgtcggccatagcggtgagcaagtccttgtcgataggcgacagcgaccgcatccaacttagcaattggaatatcccggtcttctcgtggaagtgtgggcggcatgcttagcggccaaatcagttcaggcagaagcctttgccggacttgttgtgtgagcatcgttaaggcgtgcaacgcagcaaccgcacttgcttgcggttgggtgactaactccaactgtgtctccgcaaagtcccgttgcaggccggacaactcgctgataagtgttggtgataatgccgtatccgccaaatgaccggtcaccgttacccgctggccttcccgttccagcccaatctgaacaacctgtgcattgatcaacgccgtattttccattaataattgttgccactccatccactcacctcgctgattcaacctaaatttatcgtagcatagtcccgaccttggttcactgattatgacctattatttagctgacttaccattacgaaatgagtttccgcgcgtccctgcttgatcatccaaaggatcaaaaaaacgagtacccagtattaccgggtactcgtttttagggtaataatatcgggtctagaatttttggtgttggaaattatttccattccaaaagtactaggccctaatttaaaaagccattgataatggatcaaaaacggccactagggtataccctagtggtcattttcgtttctgtgatatactaggatttataaatgttcattagaactgtccaaaaggagaaacggaaatggctaaaatcggttatgcgcgcgtgagttccaaggagcaacatttagatcgacagttagcggctttaaaaggcgttgataaactattttcagataagttaagtggggctaacaccaagcgacctgaactgcaaaaaatgctggcctatatccgtgaaggcgatattgtcctggttactgaattagaccgcttgggccgaaacaaccaggacttaactaagattatgaacaccattcagaacaaaggtgccaccctagatgtgttgaatttgccgtccatgacggggattgcggatcctaacttgcgtcaactgatgactaacttaatcattgaactgtataagtatcaggccgaaagtgaacggaagcggattattgagcgtcaacaacaggggattttcctggccaaacatcaggggaaatatcatgggcgcaaaccccaatataccgaagatgatccccgcttactacatgcttttaagctttatcgagctggcatgagtgacattgatgtgtcccgaaatacaggtattaaacggacgacctttattcgataccgtgtgaaatacggtattaaaagaaaatagggaccctattttctttacttatagttttggagggtgtttactaaagtttttttcttggaatctgattccgtgtttattaaaccatcgacgagatgtcatacaagaatgacaccctgactgtgtatacatcatgatcatttttcatttacccacttttttattttatttaagaaaaaatgattaatgctgagttaactgatctatccgaaaatacatattggtgtagctaataatataagttgacacccagtcaacccaacactagcaatctcaaaaattggttaatggacactccacttgatcggagatatgaaacacaaataattgttttacatacctattttattattgaaacatttatgaaataaatagcatgcacaggaaatattgtgaatttgttcaacagctttgctcgtatggtttccttgcatcacacccctgataaggttatagttatccttgtaatcattatagaacgtttgttcaaaaaagaggaagtgaattttatgcattggttatgggttttaattgttggtgctgttattggcgcaattgctggtgccatcactaatcggggcgcagctatgggctggattagcaatattatcgctggcttagttggctcatccattggtgaagctattttaggcagttgggggccaaatatagctggtatggccattattccgtcaattataggcgcaatagttgttgtagcagtagtttctttctttttaagtcgtagcacaagataaatttttccctatatgttaaactttttaaggctcctatgatggaattacggacaaactgttcgatataatacatcataaaggagctttttattatggcaattaaatattcaaatgaatttaaagaatcgattgttagcttaagtcagactggccgttcggccaactcactggctaaagaatacaacgtcagtgtttcaacggtcactaagtggattaaacaagctgatcctaacaacactaaagtgctatcatcaaatgaacgtgctctgattaaagaaaataaacggttaaaagaagaacttgatattttaaaacgagcggcggtgctcatggcaaaaagctaattattaaagggcgtgccctcgtgttagaagtcgtcaacgctaatttacttgctgggcaccgcattacgcgtatcttatcagtactcaaaattccgcgctcaacctactatgattatctacattggcagccaagtagaactgaacgccgccggcatttaattaaacaagaagtgttaacggcttggttaagatatccaatgtatggctacccacgattaacgatcttactaaatcaacagtctgatattcacgttagtcagcgtctggtctatcaacaaatgtgtgaattagggattagatctagaatggttaaacgaatcaataagccaaccactcagactgattatgatcagcgaccaaacttgattaagcagttaactgatcaatctggtattttattgactgatattacgtacattccccttaaccatacttggggttacctagctagtgtctataatccagtaacccgacgggttattgcttaccaatttaatacgcagatgactaaagaactagcgactaacgttattacccaagtcatggcgcaagcagttaaaccacaaattattcatagtgatatgggaagccaatacacaagtgacttatttgaaaacactttatcgaagtatggtatcaagcattcttactcccgaaagggtcagcccggcgataacgcgcgaattgaaagttttcattcaattttgaaacgtgaatacgttaatttccaagattttaagacaattcatgaagcaatcgccggaattgataactatattcgttggtataacagtgatcgtatttcacttgtagcgtagctacaggctattaaattcaataatgttggggcttatttaatatactctaaagcgtttttaaaatctgaacgggactaaaacttcggcctccgaaaattaaattaagtaatttaaattgaaagtcaaatttgttcgtacttttatgtccggattcttgacataggagccgtacttatacacctatgttgatgaaagcattgcatttaagtttatggtgtatcatggtgttatacaaattaaaattataggtagtttagaatgaaaaaaatttattttttatgtacaggaaattcttgtcgcagtcaaatggctgaaggatatgcaaaaaaaatattgccggcaaatgagtttcaaatcgagagtgcagggattgaaactcatgggttaaatctaaatgctgttaaagttatggctgaagatggagtagatattagtagccactactctaaattaattgatctaaattatttgaacacttcagatttagttattactttatgtggtgatgccaaggataaatgtcctatgcttccccctcaaaccaagagtttacactggcctttatctgacccagcgcaagccacaggaactttagaagaacaactacaagaattccgtaaggttcgtgacgaaattaaaaaattagttacaagtttgaataactacgttcattaataaaaaaacgccatacagtgccgcagtaaaacagtccaattaatttattgacttctaagtaaaataccaggagttttgctatgagttaactatgatcctaggtggtcactaaaacattccttaatttaggggctataattataaattagataatacattagaagctggagacaagattgtctagataatgtgtgagataaaatttttggcaggttatcatacataagacaaaatgtttttaaaactgataacgtatttatttcacaacaattacgcatttatttttgagaaaaatataaagcaggaggattacaatgctgaaaacttattctttaacaaaagatacattattagtttcgtcagaatcaaatatcaaaaactcttctgttgtctatgtttatggtgacgaacgagaatatatcgaatcttttgaacataaatatgactttaaaataggcaatatactaacgtttgatgaccgagttgcatatgacacgatgatagatcagaacgatgaaaaaagtttgctcgtaagttttttgtttcccgaggtacatgaaggtgggcatctagataatctgacgacatctgttgttttcttggtatttaagaataagttgataatttttacaaaacaaaaattaaaattcattcccgaactcttatccaatatggttttacgtgatgtcaataatttcatgcaggaagtacttttaaagatcatgcaaaaagatttccatgtgatgcttaacgaccttcgtggagtcaagggaaaaattgatgatttagaatcagaaatatcaacgtccggtccactcagaccaacgtttggtgatttattgactcttcaaaaatacatgatagctttgtcaacaacctatggcgctaatcacaaagcgctggatttcattaacaaaaatttcacaactattaacgatattgattttaccaccaaaaaaataattgatgagatatacgatacaagcgacacaatggatagaattattttaggttacagccaatatttggatgatttggaagatatgatagacaatatgatttcgtatcagctaaacatgattatgaaaactctaacagagatatcaatcgttttgactattccagcgattatttttggcttttggggaatcaatgtccatgtcccgtttgaaaagtcttcttatggtgtttttgccgtattgattatctctgctatactaagtctaatttgctggtttttgctgcgacgcaaaacatatttgtaaagtatttgtgataccctaatatgatttaaagcagaatttctttgttgactttttaaaaggctgattcctttcaataatttaatagcttcagcggcttccttcacagtatgagagttagaatattcaaagatagccatattccggctatctttttttcttttgggtctaccctccttatagttgggattgtgttgccttgcaaatattttaccggcttgcgtacgctcgataatcatatcacgctccatctccgcaaccgatagcaaagttctgacaatcatacgcccaattggggtgttatctatcgttcctaaatttgtactaaaaatcaattttttaaggagctaaaactatgcaacaagttgtcttacccatcaaagattcaaacgttctcaaagaggtgcaagataccttactcaataatttcaaagctggtcagcgtaactatacaatttttcaggttgggaaagcgacgctactaagagtcagtgacgttatgtgcctaaaacaagcagatatctttaatccggaaggctccattaaacaaaatgcattcattcacgaccgaaaaacaggcaagcctaataccttgtaccttaaaccagttcaaacagagcttttattgtatcgtcaatggctgcttgatcataaactagaatctgaatggctctttccgtccattcaacacccagaacggcatattacggagaaacagttctataaaatcatgagcaaagtcggcgatcttttaagcattaattaccttggtacccacactatgcgcaaaactggggcttatcgcgtttatacgcaatccaattacaatattggcttagtcatgcacttattaaatcattcaagtgaagccatgactttagcttatttaggcttagaccaagccagtaccgaaactatgttagatcaaattgattttggttagttttatttggatttttagttgttgccgaaggcaacttctgagacagattttaagcacaaaacctccactaatttttagtggagtgtaagtgcgccttgaccgagccttgctcggtttgcggactcacatagatgttctatgtgtaagtgcgcattaaactcatttcattccgtttaatgacgctaaaaaatagctaacttgatcattaaaataaaaggttttttttagttcaatgcgcacttacacgtcaactaactttgacgtgttttgataccccaaaaattgtattagatttcgctacgctcaaacaaatctttttaattgctttacaccgtttttctttctaaacttaatcacaatctttgaataactaactataaaaagatgcctttaatttaaacctgaaataattagctaatgttaggagtaactcagatggacgaaaagaaagtattaaagccaattgatgaaatgcttgctgatcctgggcaagttgatattcaagaattgtttgaagcttttgtcaatgaacctggcgagatcaaaaggaatctgtatgattccctggatacttatattttgcaaaaaagacaagaagatattattaatcgtcctggcttcgttatttagccctctaaaatcctgctgagggctttttatttttgctttggtataaatatatataaacagtctcaaaatcgctagaaacgagaaataaggcccttaaaaacgaatatagcagttagattcttgttaagattcagaaaaactaactgtttgctgtcaatggtagcggacgagcaaagcgtgggagcatagtgacttgaatttaatgtgagccgatttttgagtcgctcctttgtgttttttatttgaggtttggctctggtacagtagtacctcttttaaacctcttttagacccctatttagtcctactctcctaagggttacaggactttatcgactacattttgtctgtttatcgactacgcttatttacttctgtattcaaataaagtagtattattcaaggaggttattttatgagcaatgaattagttaaatatgatccagaactgaatacaattcctctgagaagatttactcctgtagaaatgaatcttttcttttcggttgtttctagaatgcgcgataaaggtgatgatactgttcggtttacttttgatcagttaaaagaattaagcgcgtataagccgaccgcaaataatcgatttattgatgacatacaaagtacatatcaaaaaatattaggtcttagatttggctctagaagtaaagatggacttgatagagaaatgtttgtcatgtttactcgatttgaaatcaagggttcggcagaagtcccttatgttgatattcaaatttaccccaaggcattgaaacttctaaataatcttgaaagctgggttcgatatgctttagcagagttcagagatttaaagagtagttatgcaaaaacgatgtttcgtctccttaaacaatttcgaactactggttatgcttatttttctaaaagtgatttttttgaattacttgatattccgcaaagctattggaataaacctgcaaacgttgaatccagagttattcagccaattaaagaagaactaactcctcttttcaggggtctaactattagaaaaaaatatggtaaaggccgtggcaagccggttattggttactcatttacctggaaatcagaaaaaaagaacgcagacgacttctcacaagggcaatttcaagatgaaagacaaaagcttttcaatattcagcataatagtgaactaacagaacatcaaaaatggcgcgccattgataaagttaaggggttaactttaggctcaactgagaaacaagcggtggctgagaaacaagcggaacacgataaaaaaataagagatcaagcaagaaaagaagcacttgctgaactccgaaaggggtttggaaatcatgcctaaaactattagagaacttgctgatgaattgggcgtttcaaagcaggctatatggcaaaagataaaaagagatgcgtcaatcgatttacgtcaatttacatcaacaaaaggcaatactgtttacgttgatgttgatgggcaaaaagctattaaagcaatgctctcaaacgattcgtcaacaagataccgtcaacaaaaagatgatgttgacgacaacaaaaaagatgcggttgatggacaagatgaagtgaaattccttcgaaatttagtatcagaaattcaatctgaaaaggtagattgtaaaattaatccgaacgctgttcggacaaaaaagatcagcttcctttaaaatggtgtttaccacaaacccatcttttaggagctgatcttttgtctagtataacctattccgaacgaattaaaatcgaaaccttttgtgaactagggctgtccaatatccaaatgggcgttcggattaattttacaatctaccataagcctaccgattttttaatattattttattcatcaatttccggcgccgacccaagctctgcctgaatcatccagattttcttctcaattgcggttttgagaccaatgaaaatatcttgggtactgaagtctttttcaacatcggatacttcaatgccgtgttggtaaaggtcttccaagtaacgatagccatcaactaagtgtgcgaggcgttctggggttattttgtcccattcaccaggccagtcttgaatcttagtgttttcggccatttcttttaaggtcgagtaaggactgccatcaagcgcaatcagccgttcagaaatgacatcgagttggctgtcaatttcttccatgaactcatccatcaaggggtgcaacttcaaaaagttgggtccacgcatgtaccaatgcgtctgatggataatcattgacatctggctcaaatcggcaacgagttgatttaatactgctttggttttcgtatatttcattagattgatctcctttcgatatggttattgtagcatagtggtagcttaatctgaaacgttatacactggcaaattaagttatttatagcccgtagaattaagtcgttttgaaaagatggagacgttacaatctaccaattaaataaatctacaattgaattttatttaccttatgaagatgttcaaaacgcgttaaaggaaagtgcgcaaaacccctttatacgtacaaaggatgaatgggtagtgggtaacaatgagtgtaaattaaataaggcacaaaaaaggatgcttaaggataaagaaatatataatcatttcaatttagaaaatattcccagttccatcaaaacggagctaaacaagatagtgcatgacatcgatgactaatactttaacaccaaacagaaaggggctatgaatatatagggtctataactatcaaatagtccatttttttagtataagagcagtaaaaccagacgtggaaaccacgtggtcttttagttgattcagtaaaagaagccgaagccaaagtgaagacgttggtttcggcttctttggcttttaattgcgggaacgcacacaaagagccaaaaaagattactgacagccatcttctgatggctgccagtaatcttttttaagttcttgttcaaaaggtttgataaaatcaaagctagaaactagctccggtcatgcttgttgcgatcattatcgcgtaagtcttctacgtgggcatcaccactcgtatcgatatctagttcttcgcggccgacgttttcacttacttgtttcatatcttcgcgttcttgtttacgaatgtcaacttcttctcgaacgaccgggcgtttgttgacatcgatctgttcttctttgattgggatcgtgatcgtgtcgtcttctagcgtatcattgacatcggtagttgcagccgcaccatctccgggctttctttcgatcacgatttcttctcgtttaaccggtacgtcgactgttttcgtctcattgacaacatttttatggatatcgactttacccgtcgtcacatcatgcttattgatatccaattgttcttctttaagctggatactatcagtatcagtatctagatcagttgcacgtgcagcatctgatgcatgtaaattatttgtgctagtgtcaccagctgcatgtctgcctgtaacattttcagttgcttgtgttgggtcgtttttataattattgacggtgataataatttttccagctgagatatcatctctatattggtaaagcgggtcgttgtttgcatggtcagcttcttcatttaaacttgaatcgtattcgtacgtatcagcagaaaatgcatctttgattttttcccatagtgagcgatcttcgtgagtcgtttcgacgccatttacgccggttttaacatcgattcctgacagtccagcaaaaccaaaatttgtagctgcatctttgttggtgtaaataatgatatcatcacggctatagccttctctttgcagttgttcgatcacggataaagcttcttctctcgtactgtaacttccaataactgttaaatttctttccaacatataaatccctcccatttcaactatttttttaaatacgcttacaattgcagtataacgaattcagcaaaaactttaaaagaaacagctcaagaacaattaatcgtcaaagctgatgatccagtgaatctttaaaatcttgtgaataacgaattgacataaaaatactcctatactttcattttacggactgaataaaaatagtccatttttttagtataagagcatttatcattgattgcaccattaggattgacgacattgattatgcaagatggtgttttccatattagtgaaggatcaccaattattgcatttttgccagtcattatgattggaattgtcttcggtctggcgatggattacgaagtgttcatggtctcacggattagggagacatacattgccactggagatacaaatcgggctgttaaaacaggattgcaagagagtggtccagtcattattacagccgctttgattatgattgctgtctttggaagttttgccttggttgaagatccaacgattaagtcaattggtatttcattagccagtggggttctatttgatgccttcttggttcgtctgattattattccagcgacaatcaagatattcggtcgtgctaactgggtattcccaggagcaaattactataataagtttaaggatgatgcgcaataaataggtattgtggcattaaaaatattttttttgggagggcaaattacaagtttaatccgaacaagcccggaatctttcaatggcagtctgttgatgatgtatttttaatggtcgttgattaattagttcaagtgctgctaggatctcatcagtcgttacttggctaaaattggtctttttcgggaagaaccagcgtaaccgtctattaaaatattcattggaacctcgctcccatggtgaatatggatggcaaaaataaactttgatctgataatcctgttctaaggcctgataattggcaaactctttaccatgatcaacagtaatggattttacttggggaccgaaggccctcataaacttgccaaaggcggtgtttagagccttagccgttctattaggggctttgatggcccatagaagtcgggtcttacgttctacgaatgtaaccagacatgatcgtgactcacttcgactagaaagcaccgtatctacttcccaatgaccaaaagctaaccgttgattaacagttgttggccgttgttcgatggaagtcccacttgtaaatttcccacgattttcgctcactcggtgctggcggacattccgattgggtagatcagtcaatttgaaggggagccagccacgattaagccaattataaattgacgcagtgctcaagttataagcggccgcaatggtttctggtgaccaggttaatcgtaagtgattggtaattaaagtcgctaatgctgccgtcagcatcgaacgacgaccgcaattccgccttttgcgatctgcatcttgctgagctaattctggatcataaggtttaactcggtccaactcatagctaatcgtagctttggcgacgcctaaggcgtcagccattacttggtaagatttattcccctcattgaccagttgtgctagtgcgccacgttgaaaacgtgataaagtagatgtacccaaagtaatcactccctatattggttggaattagctactaccattgtaagtgattgctttgggctttttaatttctgttcggattaattatagaatttgccggagtgattttaatcactctttttttgtttgattatgtcgcatttttgatatctttactatttataaaacaatacgaataattttatttttgaggtaataagatatagaatggcactaacttgtcgtttaatattcggcagattgcaagaaataacttgaacgaatttaatgacgtaaattaagcaagaagatctcgattggtgtatgccaattaagacatttaagtggccgtgaattcaaataccaattaatttgaaccaattggtgatcacttagttcttcaatggcttggcctttgggaataaagcgccgcaaaactcggttacggttctcattactgcctctttcatgcggtgaataggcatgggcaaaataaacctgtgtaccagttcgccgttcaattgtctgatagttagcgaactctttaccatgatctacggtaagcgtcttgagcttgtcttgaagttgactagctagttcaagtacggcttgagtcatggactgactgtcgcgaccatggagccgtttaacaattgtcaggcgactcttacgctccacaaaagtagccacagcttgacctttacgtttaccagaaagtacggtatcagcttcaaagtggccgaattcctggcgagtttcgactttatgaggccgctcctcaatggagcggccgtgattgaacgtaccacgcttttctttagcacgatgacgacgaattccatgatcaggcaaatcgggcaactgtatatcaagccatccttgatcaatccagttatagaccgtcttgtaggcaatccccaccacatgggcaacttgttcaggggaccacttctggacttgaatcttttcctcgatcaagtgtttaaggtttttagtgagcgaagacttccgcccccgttgactaacctttcgttcaaagtcagtttgcgctagcccagcctggtactcactatttagccggtgaagttcgttaaagatggtggtcttactaaagcctaagtagttagcgatgtatcgcaaggaacgtccttcattatgaagcgtttcaatgacaacacggttctggaatgataaaatagtggtgctcatcaaggtccttctttctaatggattgtgtggtaacaccattaaagaccttgatgggtttttctgtccacttaaatgttcaacttaaattttacaatctgccaaatactatctataagtaattctttttcagaaactgtccacaccaattttctctgataaaccctattaacgaaaaataggtttttacgataattgctatatgctattaatatacttaatccatctgttgaggtcttcatgcctatttttctccttttggtactcacattttaatgttcataaggtagattgtaaaataaagttatatttctgtgtatatggtagattgcaaatttaatccgaatttttggacaaatttgtcagcataacctgatacggtgtttgccagtcgagtattttaagcggtcgctggttaatttggagtaacgtcgtcgttaaatcttgagcactaatgtgctcaaaacgagtccctttaggataaaaataacgtaaattccgattaaagcgttcattactaccacgttcagctggcgtataagcatggcagtaataggtcttaataccatattgtgattcaagtgatactagcccactaaactcagtgccacggtccacagtaaagctgtgcaccggaccattaaaagtggttaggaacttagttagtgcttcattaacagtcgctgtcgtccgatcttttaaccggtatgcccaaaggaaccgtgatttgcgatcgattaaagttaataaaactgccttactatgcccacgaggaccaacgactgtatctagttcaaaatcgccgatgcgcttacgttgattaatcatcatgggacgctgttcaattgatcgccccaaagattgattatatttggatcgttggtcaacgttacgccgttggcgtacgccatgttcaggtagatcattcaaggagaaaccaattctcccctgatttagccaattataaatagatttagtagctagtttaaattcgtgagcaatcattcctggtgaccagcttagacgtaaatggttgagaattttttgctttaactcatcgctcagcttagttttccgaccacatcgtgatcgcttgtattcggcatctgtttgtgctaattcagcctgataaggttgacatcgagataattcataagaaattgttgacggtgatcggttcatccgaacgcccatttggatattggacagccctagttcacaaaaggtttcgattttaattcgttcggaataggttatactagacaaaagatcagctcctaaaagatgggtttgtggtaaacaccattttaaaggaagctgatcttttttgtccgaacagcgttcggattaattttacaatctacctaatgatgtttaaaaagcgcgtccatcacttgaaagctggttgttcgaataatgtaagcgaaccgaagttcaaaaagaatcgcgttagaagacattccttcaggataatcgagttcatagcggttattgactgttgttagctgaatattggcgtctaattcagcaaggtctagttgcaacttttttaagtagcaaattgcagttaatttagaaagtgagaaatgatacataatatcccgaagcatgggtgcttcattggcttggataatatgatctagtatacggattaacgtaattgacttagtggataaaaagaaatctttcataggtagcactcctaacagaaactatttttagcattattcggttaagaactgtctcgcgctcctttatgtgacgagtgatggccgacaatctacggttaatattgtttttgaattaatggttattaatatacatatttaacaacattactgataatagttaatattagcaagttttttatcgatatgcaaatctgttgcatgtagttgttaaagagaagtagttctttaaaaatccttattaaagccgatttaacgggtttttaagccaattacgaaatatattcattaaatttgatgtgcaataatgagaataaattattagaaactttaaaatgcactggttatctagaacgtcattttccaatattcaaaatcaactaatggatgccaattaaaaaaaccttttcaaaacgattgacacaaagtaaaaaagcgcttacaatgactttggtattaaaaatataaaaaactatatcttttaatttagtgaattaggttgtaagagttattaatctttaaaatttgaaaggaaggatcgctttggaatataaagaaatctcacctgcaacattgggtgaggaacgattacgatacgatatccaaaaaggagccttcgctaatctttcggaaagagaattggctgagcgatatggtatcagtcgaacagcaatgcggcgctcgttatcagtcctccaaaatgaaggactaattgaaaaaaagccacgtgtgggaatgacagttaacaataagcatgtgattaacatgctggcaatgagttcaatgtcaacggagttaaatccagacgaaattcaaaccgaggtctcacaaaccgaagaaccagtcgaagaagatgttgttcgatttttgaaggcagatcatgtatttgaactaccgcggaaacgaatgattaatgggaaacccatttcgtacgaattagcttttttaagtcaagaacgctttccagaaattgagcagatctcttttcagaatcggtccctttatcaaacactgaaggatcaatatggggtggtcttaggctacgggcatgaaacgattaaagcaggatatgccgataagaaacaggctatcatattagaaataccagagaagacaccattatatattgtaacaagcttggcttacgatcatgatgatgagccggttgaatatagtgtccagtatctgattgggtatcaaattcgttaccgattagatgcgaaaaatatttttgattatcgtgaggatggtgatttgtgatgaaacaatacttatttgaaaccatttcagacgaaatcgaaactcgcattcagcgtagcgaatttaaaagtgggatgttgatgccaagtgaagctgaattacagcaattatttggtgcaagtcggacaacaattcggaaagccttagataatttagttgctaaagaactaattatcaagaaaaacggtgtaggggtatacgttaaaccccagatttcttcgcaaaatattttagaaatgacgggggtgatgaagaataataacttaggcaacgcagcaaaacagattaaagaatttcatcttcgcaaagcggataaatattatggggaattatttgatatcagtgacaacgcgttgttgtataccatcaaacatgtttatcaagaaaaaaagaatcaggtttacgaaacgattattttaccgcagcagttatatccgactttgagtcttgcggatatccagatggtcaatactatcgaacttgtcaattcggctaaggaaaatttctacggaatgcagcaagatttacagctcgtcagcatggcatcaacgcatgctaaatatttagatctagaagaagatgcgttgctctttaaattgagcagtcagtattacgctgaaaatcataaagtgattgggatttcgaatcgctatgaaccagctgatacaacagaatttaatattgattttaattaagggggacttcacatgatagaatttttaagaattgatcaccgtttattacatggacaggttgcagtttcttggtttaacgaattagatgttaatacgattttagtggctaatgatagtgtggcgggggatgactttcgtaaatcagcaattcgcttggcgaagccagaacaagcgaagttagtgatgaaatcaattgatgacagtattagtgctattaattctggcgcaaccgataaatataagttgttaattgttgttgaatcagtagcggatgcggagaaattaatcaaaggaacgggcgataagattacattgttaaacgttgggggcacaaaacaacgagaaggaacgaagaattattctaaggcggttaacttaaccgatttagaagtcgatcaattaaaagcgctttctaaatctggtgtagacgtctttatccaacaagtaccgaatgaaaagaaaatgatactaccagaataaaaggaggataaactcatgaaccatatattgattgccatattattagcgttaacagcgatgttggcgaatgctgaatatttatttggatcatcaatgttatcgcgaccacttgtgacgtgtaccattgctggattaattatgggtgatatgaaaaccggaattatcatgggggcaaccttagaactggcctttgtggggtcattttcaatcggggcttcgattccaccagaaattatttcaggtagtattttaggaacggcctttgccattggtgccggtaagagtacagccgttgcgttaacattgggcattccgattgcatcgttagtgctagttattaagaatctgtgcttcatctttgttctgccatactttgttcataaggcagataaatacgcggccgagggtaattcaaagggcatggatcggatgcaattgttcggtgggttcttctcaatcaatttaccaatcggcttaatcgttgcaatttctttcatcgttgggagtccagtaattaagtcatcattagcggttattccaaaatttgtcatcgatggtttaggaattgcgaccggcttattaccagcttatgggtttgcgttattgttgaaattaatggtcaataaacacaatgcaatttactttgtattaggatttgccttagcggtttatatgaaagtccctgttactggggttgccatctttggggcttgtcttgcattggtattaactggctactcagctttcaataatggacataaaggcgagacagttgctgcaagtacaacgaatggaggcatcgattatgaagatgaagaattctagtttaatctcgaaaaaagatttgatgaaggttttctggcgctccttcacgatggaatgggcctggaattatgaacgacaatcaaatttaggctactcgtttgcaatgacaccagcgttaaataaaatctataaaggcagtaaagaaaaattaacgagcgcctataaacgacatttggaattttataatgtaacgccgtggctttctacatttccattagggatttcggtagcaatggaagaacaagcggcattagatgaaaattttgacacagatgcaattaacaatatcaagattgcgttaatgggtccgctaagtggcttaggggattccttcttctgggggacgttgcgggtaattgcgaccggaattgggacttccttagcgcttcaagggaatctgctagggccgctgttattcctgttaatcttcaatattccggctgttttagcacggtattacgggttattcattggctacaatatcggtgcgggcttcatcgaaaaagttcaaaaaacgggtttaatggataaactctcctttggcgcttccgtcttagggctgggcgttgttggatcgatggtggcgacaatggtgacgctgaagatgccattgacgattggtgcgggtaaaggtgcgccaactgttcaaagtatttttgatgggattgtaccaggcatcttgccattactctttacgctctttattttctggttagataaaaaaggcttgaaagcacactggattctattattaattgcagtaattggaatctttggtgcttacacaggtctactgaagtaggaggcagcaagcatgcaggatatgttgcattacattgaagcagaaccgaaaatctatgctgatatattagccaatcggcaaacgatattgcgtacgttactgaatgacaaatcaacggcatataaaaatgttgtgatttttgcaactggatcgagttcaaatgcggcgtttgcggcacagccttatatgagccagcaattgggcattcctgtttttgtcgaggagccatcttttacggcgaactatatgttgcacctgcaaccggatacgttgtatatcgccatttcccagggtgggcatagctactcaacgattgagatggtcaaacgggttcaagcaatcaacggccggatttataccatcactggtgatgaaaacagtccgattgccaagctaagtcagcatgtgattccactagggatgccaattgaagagatgccctatgtgaccgctggctatagtgccacgattttgacattaatgttgttggcgcttgaattgggtaaacaggatcaagcgagttatcaaacgaatttggcagcgattgaaaacattgtgactgacctaccacgcatcattgatgctgctaaagaatgggtagcgcattatagcgatgtgtttgatacagtacaacgcgtaatctttgttggttatggtggcacatacggtgtggcccgtgaaggtgaaactaagattacagaaacagtgcgtattaccgcactcggtaaggaagttgaagagtatatgcacggcccttatattggactccacgcaagtgatcatgtgattttcattgaaccaaacgggaagttacaagagcgagtcgctaagttacaaaaatttttaaccggaaaagtggcgaaggttgtccgaattacgaatggccaagttgatcgtcaagacgacctcggcttagcgttaccaactgatgagttgttagccccactctttatgactattccaattcacttattggcttataccgcatcagcgcgcaagcaaattaatctaaaagtgtcagcttttccagattttgatccaattacaaattcaaaaatataaaaaattgaaagaaggaaattgagatgttgaaatttaacggaaaagaattattggcaaacttagaaggcggaattgcactcagatcagacattaataaaattgtcgatcaaattaatgatgagggttatagtaatatttgttggattgggatcggtggcacttatgcatcatccatgcaagcggtcgttcacatgaaagaaagaacaaaaattgaaacattctacgaaaacgcagcttcgttcttaacaactggcaatctccgagtgacaaaagacacggttgtgattatttcttcagttactggaaatacgcaagaaatggtcgaagctgtcaagaaatgtaatgaaattggtgcacgtgtaattgggtttgttgatcgtgcagatgccgatttagcaacgatgtgtgattatttaatttcatacccattgaatgaacaacttaagttcttcatggtaggtgatcgctttatgtatttagcaggggaattcgatcaatacgacgaattctacaaacaaatggatgataactttgcaaaagatgttgtggctgtttataaaaatgcggacgaatttgctacagaatttgcactgaaacatcacgaagatgaaatgcattattttgttggggctggtaaccaatggggtgctacgtattcatatgcaatgtgctattgggaagaacaacattggctcagaacaaaatcaattgaagcgcaagaattcttccacgggatgttcgaaattgttgaacgcgatacaccagtcacaatttacgtgacagaagacagtcaacgacaattgagcgaacgcgttgctaacttcatcccacaaatctgtgctaattatacggttatcgatgcgaaagattacgacatgccggggatttcaccagaattccgcggtgcattatcaccatttatcttgcatgcggtcaatgagcgaattgatgtgcacatcgaagacttgaaccgccatccaatggaaattagacgttactatcgtcaattgaaatattaaaatggctggaggaacagagatgattggagttgtgatttgtacgcatggtgccgctggtagaggtctagttcaagctgctgaaatgatttgtgggcaacaagcgcatttagcagttgtttcttatgaaatgggggaaacgacagaagctttacgccaacaaattaatagaagttttgcatcatttgaaccactatctgaaatttttgtattgactgatattaaaggtgggacaccttttaatgtgatggttgatatcattcgggatgcgccacagtatcgactcgtatcaggtgttaatttaccgatgttacttgaattattcatcaaccgtgacaacttgggattggatgcattaacagataaaatattagcatctggtcaaaaggggatttatcaatacactgtttcaaatgaggatgctgacgaagatttctaattaataacaagagtcgtgctgtttaaaaatagcgcgactcttttattatgttttacgtgaaacatcctaagccattgttccacagaaatcccgaaaagttagcctaaactaaaatatttgttaattccattaaaatcatgtatgctgtagtgagaaaagttaggtttacctaaaagaatggaggctctttatgttatcagttaagaacctcaccgttgcttacgatgacacaccagtatttactgatgttgccgttcagtttgacgcaggcaaaatcactggcatcattggaccaaacggtgcaggcaaatcaactctgattaaagcaatattagggttggttaaggcacggcaaggctcagttttatatcaagatcgaccaatgcgcgcagttcagaagcaagtcgcatacgttgaacagcgtaaagatttggatttaaattttccaattaacgtttttgacgtggtgctaacgggcacgtatggcaagttaggcttattccgcgatccgggtaaaaaggcaaaacaagccagtcgcgcggcacttgaacaagtatcgctcagcgaatttgcgcaacgccaaattggccagttgtcaggtggacaattacagcgagttttcgttgcacgcgccatcgtccaagaagcggatattattattttagatgaaccgtttgttgggattgatttacagagtgagaccgcgatcatggcaatcatgaaacagtggcgtgatgcgggtaaaacaatcattgtcattcatcacgatttgaataaagtatcgcaatatttcgatgatttagtggtgatgaaccacggcatcgtcgattatggaccaactgaaaaagtttataatgcgcaaaacattgagcgtgcttttagtgcggacttatccgctgtcttgtttgatgcacaggaggtggcaaaatgacgagtattccagcttttattagtgcgttgggtcgttatgaattcttgcagagtgcgttgctgaccgccgtaatggtcggcatcatgtctggcattgtcgggagtttcatcattttgcgcgggatgtcgttgatgggtgacgcgatttcacatgcggtgttaccgggtgtcgcagtggcgtacatgttgggaattaatgtgctggttggcgcatctgtatttggtattttagcggcggtcttaatcggctttgtcgcaacacatagtaaaattaagacggatacttcgattggggtcgtctttagtgccttttatgcgcttgggtttatcctgatttcgatggccgaaagtgcaaccaacttacatcatattttattcgggaacattctcgccgtcagtgatagcgacattatgagtacggcgattgtcttaggcttagtgatcttattcgtctcattcttctacaaagaattattgattacctcgtttgatgaaacctatgcgaaaacatatgggttaaaaacgcaggtgctacattacggtttaatgttggtgctaaccttagtcacggtttcagccctacaaacggtcgggattattttggtcgttgcgatgttgattaccccagcagccaccgcctttttatggacggatcgcttagtgacgatgctcttcttatcggctgggattggtgctgtgtcagcaatcagtggattgtacttcagttacacattgaactgggcatctggtccggcgattgttctgatggcagccgtgctctttgccatttcattcatctgcgcgcctaagcaaggtttccttaagtggcgcaaaggaggacgaccagcatgaaaaaaatgattgtgacgttaattgcagtttttggtttggtgggtggtgtgtatggtttcatccagcaccgcgcccaatctaaacaacaacaaacgaaccagcagactaaattacgtgtagtgaccacgaattcgattcttgaagatatggtccataatgttggtcaagaccacattgaactttacagtattgtgaaacggggaactgacccgcatgaatatgaaccgcaaccgacggatatttcaaaagcgactgatgcggatgtgatttttcataacgggttaaatctcgaaacgggtggcaatggttggtttagaaaacttgttaagatcgcgcataagcaattcgaaaaggatgttttcgctgctagcaaaggaattcaggtgcaacatttgacaactaaccaaacagaacccgatccacacgcatggttggatttggcgaacggtattcaatacgttgaaaacattacgaaagcgctgcagaccaaagatccagcgcacgctgatgattaccgcaaaaatgcggatcgctacactgcacgtttgcgcaaattgcatactgatgcgcaaactaaattcgccgatattccagctaatcagcgggtcttggtgacttcagaaggcgcctttaagtattttggtaaggcctatcaggtcacaccggtttacatttgggaaattaatactgagtcgcaaggcacacctgaacagatgaagacggttcttgcaaaaattgcagattcagatgttaagcatctgtttgttgagagttctgtttcgccgaaatcaatggaaaaagttgctcaggaaactgggttaccaatttatgcgaaaatttttacagactcactcgcgcaaagagggaagcaaggtgacacttactatacgatgatgaagtggaacctagataagattcatgatggcttagtcggtcaataaaaagataatttttagcaattaaaaaagcgggtgcttagacaaaaataaatttgtctaagcacccgctttttttgtagttatccttgttgagaaagggaacggcgattggcgaagggaacgagccgctttttttgttttaagaaccgttgccggtagtaacgatattgtggtgtgaatggatgggaagatgaggcatgccatggcttttcgtgaccacagaagtgaacaagcgcaggttctttttgggtttctaagaattgttttttgaggtgttcagttggtggtgtgatggtgttcatcaaaatgtttgtttgggcattccacatagggtgaaggtgaatccaccgatcatgcaaaattgcatttaaagcatcttgatcgtggaagcgtaatttctcagggtgctgattgatgaagtcgagtacacggctgacaatattgtgttgacgccattttttgagattgagtaacatcacaccggagttaaagtaacgcggactttggtaatcgatagccattttttctaagcgttcgtggaacccagcatcttctactgcagcgaggaaggattggcctaagtcgatatcccatagccgggctaaatctgtgaggcatagcgcatcgcaatcgatgtagagtgcacgatcgaggtgagggaacacgtcgggaattagaatccgatagtacgccgtttttaagatccgatcactttcaacagtattggccagtaaagattcgttgacctctgcaaaggtcaagtcggcatcaaatcgagccacaacatgctgtaagactgctttatctcgtgcggtgaggtggtcttctaagacgtaaaaagcatagtgtcgatgtgagtcattgtgattaagaattgaggcgtatagaattgccagcgtttcgatgaaatcggaattgacagccgatacaatgttgattatatcggattgttgcgcatgtaattgtttgagttccttttgatattggtttaagaaggggtgactttttagagtgttccaaggtttctcgtgtgttgtgaagtgaacaattgccgggttggcgattgcttcatcaaataaatgggcatattcagtgttgataggcgtatgttttctaaagagcaatgagttttgtacgttccatttaggatggagtagtttcactttaccaaccaaagtggcatttagcgcatcttgatcatggaattgtaagcgatccgcatgatgattgatgaagtggaaagtccgctctgtgatggatgcatgattccaccgaaccgtatcaattagcatgacccctgaattgaagtagatgttattcgattgtggtggggtgatgccgagccgtcgcagtgtgagtgcttgtccaggatcaatcacggcacccacgatatttgtgcccaaaggcgtattgtatagcggcgtgagatcagtttgtacgaggatatcgacatctaaatataagacacgttcgattttttttcgcaacaaaagagttggcgctaaaatgcggtagtaagccgttttgttgatatggttgctttcaggacagttttcaaaaagctgcttattaagtgcaataaactcaacttgattggggcgtgggacgcgcttggaaacagcgtgtttcgtttgcggagtgagttcattatcgagaataaaaaaattaatagtagttttgggcgaaatatgggttagaaccgactttacggcgattaaaagttgatcaccatagttttcatctgcggcaaacatgatattaatagcgttgataataaccatctccttttaggtgttgtgtctttatttaaacaaattcaacaatctttgtaaaggtaaatgattatgctaacaataacaaaacgtaatcataaaagttgcatcaataaatgtgattgttttatattgatggtgtagcgttattaaagatttcatgaaaggaaggttgcttatgcaaaaagaagtccgaattaggaaagttaggttaggtcgtagtacagtcaagaccccagaattgtgcttggtgattaagaaagaatcagccaatctaaagtgttttctagaaggtatgactgatttggaggaagcaattttaagagagaataacggtgaggccctcgtcggtgagagctgggggccattggaatttgatcatcgtggtcgtgtttttagtaacaagacggtaaaaaggtgtcttcaaaaattggatgataatcaatgatcctagcagccaaagtggttgattagagaggatgagtcgatggtttcgcgcatattaccaattaaaaatggctacaatttcagagaactaggtggctatcaaacactggatggtcgctcgattaaaccgcatcgattattcagaacggggaatctggcgaatcttagtaagagagaattggtgctcttggaaagctaccatatcacctatgtcgtggattttcgttcaccaatggagcgcaaaaaagcgccagataaaaagattacgacggcatcttacgaatcgttgccaatttttaaagaagatgcgacgcaaagtacggcgagtgaagcggaactttatgagcgctacaccaataatccgcttggtgggcagcaacaaatgcgccaagtctatcgagaaatggtgcaagatccctattcaatcggaatgtatcgccaattcttcgaacgattattgactgaagccgatccgcaacaagcagttttatttcactgtacaggtggcaaagaccgtaccggaatggcggcttattatttattaaatgcactcggggcacctgaagatgtgatccaatatgattatctattatcgaatacagcatctagggaacacgttgcagcccgcattaagacgctacgtcaaaaagatgcctcaagcggctttttaaaaagtatgcatgcattgatgagtgttgatcagtcctacttaagcacagctgagcgcataatcaatgaggattatggttcaactcaagcctatttacaacaggccttaggattaacaacgcaggacattgaacatttaaaagcagtgtatctagattaattggaaaagagggaacaagaagatgggtaaaccagatttaaaagatccgcgaacactttatcggacagagccatttcaagaacaagaacaagctagtccggcattgcaagatcaaatgcatcccaagccagattgtggcgaagaacactaccatggtgcacaacggttactagatcgtaaagtgctgattaccggaggagattctggtatcggtcgcgcagttgcaattgcgtttgcccgagaaggagcagacattgcattgcaatatttgccaggtgaagaagtggatgcacaagaagtggctcaattggtgcgagatgcagggcgtaaaatcgcattgatcccagctgattttcggaaaccacagattgctagccaagtagtggaaaccgcgcagcagcaaattggcacacttgacacattagtcttaaacgcagctcaacaaattgcgcatccatcaattaccgaattaccaatagaacaagttcaagatagttttaacgttaatgtggttgcgatgtatgcgcttgtgcaagcagcattgcctcaattaccggctggcggcagtattctgacgaccacttcagtgcaagcctttaatccgagtccgcatttgttagattatgcagcaacaaaagcagcaatcaagaattttacgatcaatctagcgcaacaattagcggataaaggtattcgggtcaacggggttgcaccaggtccgatttggacaccgttgcagttggctcaaggacaactggaaggggctttgcctaagtttgggcagaatacattgctagaaagagccggccaaccggcggaattagcaccgctatatgtttttttagcaagcaacgcagcaagctatattaccggtcaaatttacggcgttaccggtggcgaatcaattaattaaacaagtgcatttacgataatttaataatattgataagcgtattgttttacggatgctggttgaatttgttacatttatggagaaccagcaatatattttaaggaaacaagaaaggatgattgttatgttacattggttatgggttttaattattggcgctttaattggggtgattgcgggggcattgacaagtcgtgatttacctgcaggttggatcggcaatatcgtcggtgggttagtcggcgcctggctaggccaatcattgtttggcagctggggaccacagcttgccgggatggccttaattccatccattatcggtgccgtgattgtcgttttcgttgtttcattattattcacacgtagaaaatcctaatacaaaggggcggacaccatgaataaattaactaaagtggtgatcagtttagccagtttgcttgggttgtgtcaggtagcgtggtttatcacattaatctatccactacaacaatccaataagcaatttatgcatcttagttggctacccgaacaatgggtcggtaattttggacttggattaggagtgcttagcggcttaattttcttatatttactgctattggcattattcagtccaccgaaaaaacgccaaatgatcatcaagaccgataaaggtgaactagcactttcccgcaaagcggttgaaaaaacagtgacacaagctattattgaaaaacaccgtgttaaggaagtgttagtccatacgacgtttaaaggccgacatccaaaagtgactgccgacgttcaagcggtcgcagtggatcgcaacgatctcgatcaacaagcacgggcagttaaagaaacggtacagcaagcattacaaacaatctttgagatgccgattaaagcagtgaatgtcaaactatcaccgctaagtaatcaggcaaaaagtgatgtgaggtgagacaaatgagacgttcttattggggctttgttgttggggcagtgttggcagccatttggattagttttggatttatgagtttaatcttgattatcatcgctggtttactcggctacattgcagctagtttaacagggtctaaggaagacctagaaggatttagatcacaagttaaccgggtcttgaagcaggataaataacggaggtgtgacaaaatggtagaacaagcacatttagatgaagtgatggccaatagcaaattgacttttgaagatgctgtaatcgccaaaattgctggtaagacagcgcaaaacattgatggcttattatcgatgaacggtaatttcttcagtgatattgcggatcgttttagaaacgatagtgatccaacgaagggcatcagtgtggaagttggcgaaaaacaggtcgcaatcgacatgaccattattttggaatacggccggaatgcacgggatgttttcgaacgattaacagctgcagtgactgaagctgtcgaatcaatgaccggtttgagtgttgtcgaagttaacagccatgtcagtgacattatgactaagaaagaatggcaacaacaaggcagtaatccaaagaaaagtgattctgaaaaacgcgttcaataaaaatagtaaaggatgatgaaaacgatggataaaccaaacaaaccaatggataaaatgatggataagacaatggatcaacataccgaaaaaatcgaaaaagaattgaacttctcggatggtgtgattgaaaaaattgcgggccaaacggtgcatgacatcgatggcgtcttagaattatcaggcgggatgatgagtcaattagctgatcgtttcagagaccaagaagatccgacaaagggcgtcgacgctgatattgataaccaagaagtaacgattgaattggatgccatcttggaatacggtaaatcagcgccagacatcttcgaacaaacaattgaacgcatcgctaaatcagtacatcaaatgactggtttaaacgtgacgaagattaaaatgaatgtctctgacttgatgaccaagaaagaatgggcagcaaaacaagattctccaaaagaagataaataaaaagaaggtatccggtgggccggataccttctttttgtatagattagtgttcaaattggtttaaatctaaatttaatgccgttgcgactcggcgaccgtattctggatccgcttggtagaactgtttgacttcgcggatttgaatttcaggttttgtaacttggccgagatttaagcgaatgttttcgattagtcgatcttgttcttcatcagttagtaagttgtaaagcttatcggctgctgaatagtaatcgggatcggctggatagttaccggtttgaccgctaagttggtcgccatgaattttggcagatgggacttcttttggaccatcttcactattaggttcatagttgacgcctgtctcttggttttttgccatgatcccgtcgcgttcgtaattatgcacgggcacttttggccggttaacaggtaattgttcatagttggcacctagacggtaacgttcagcatctttataaccgaacaaccgtccctggaggagtttgtcaggggaagcttcaatcccaggaactaagttagcaggtgagaaagccaattcttcgatatcctcaaagttgttggttggattttcatcgagtaccatttgaccgatttcgattaaggggtaatccttttgtgaaatgaccttcgtcacatcaaagatatcttgcggatagtttaaaccagcttcataaggaacaagttgaacggcaacggtccaacttggatggtcgcctgtttcaatcgcatcgaataaatcattttgtagataatctgtatctttaccagccaattcggcagccagttcgttacttaagttatggacgccttggtttgtcttgaagtggtattttacccagaactgctcaccagcagcattcacccatttaaaggtatgactaccgtagccatgcatcatccgataactagcgggaatcccgcgatcactcattaaaatcgtcacctgatggactgattcaggtgaaagtgaccagaaatcccactgcatgtcttggcttctcgcgtgtgttcgtggatctcgtttttgggagtgaatgaaatcagggaatttcagaggatcattaacaaagaaaacgggcgtattattaccaacaatgtcatagttgccttcttcggtatagaacttaagggcaaatccacgcacatcacgataagtatcgggatagccggcttcaccagctacttgtgagaagcgcgcaatcattggtgttttcttaccagcaccactgaaaatggctgcctttgtgtaggcgctcatatccttagtgagttggaagtaacctttagcaccggcgcctttagcatgcacgacccgttctggaatccgttcacgattaaaatgcgcgagtttttcgagcaattaataatcctgaattaaaacgggaccgcgttgaccagcagtttgcgaatgttgattatccgcccacggttggccctcattagtcgtaaaccgtcatgttatctgctgatgagacgcggcttaatgtattgctggtataaataagcagcccccaaaaagtaactagttgccagtaaagtgacgagcggcaaactttgaaacatttggtgtgggagaataatggccaataaagggaaggcgtaggcggcgggaattctgacttgtagcagatagagtaatgcccaaactagtggcagtgcaattaaggttaccaataaccgtgaatcaagtaagctataagcgacgaatccgattgtggcggcgccagttaatgcaaccatctgcttgatggccattttacctggatacattggtttttgtagaatttcaaaaaagacgacaagtaccggcggaatggcagccatctgtggccggccgagtaaactaacaactaacacccataagagtgcaatgattagaaaaaccagcatgacgcgatagttaatcgtggcatgatagggatgttgcagatgcaatttgcggaggctaacgaccaacatcaaagtgagcgtaaagcctaaaattgcaatgatgaatgaaagttcagtggcgttgacgataatcggtaacagccccgttgcaaacgatggtgcgagtgttgagcgaaataaacaaagtaaaacaatcatgatgagtagtagtaagctaattttaactgcataactgagcggcaaccgattaatgccaaacccaacgatggcggttatcgatggcagccaaaatatcttggcgggttgattgagccaacccggttcgtgataaatccacagccccgttgttaaggctgcgatttcgggtagaataatctcaacatcgttcaagacagtggcaatgccgaccatcaataatacgaatccaaagccgagtaagtaatccgatagttttaatttttggggtttcaaaagataaatgcctccttagtgtggtttgagtaatagtatttattatacgctactgaaaaaagaggacaactcaaaaaagagcgtttcaactaacgaatagctgagacgctcttttttgaattaaataattattagtcgttcaagttatagcgtaatttcatgtgttctgagcctgaaatcaccatttggccaagtagggctgtttggcgtttaagtgattcgctagctagtttgttattagcggcttccaagaaggctgcagcgtctttttgatcagcgaaggccttgtcggtttcgttttggatcacgtgataggcactcattgcttcgagttcgaaggtgttacgcatatcaacgtagaagtcgtaatctgtatcgccaagtaaggcggttgtacaacttaaccagtacatattgttcaagtcaaaaatacctgtggcattcttgtatgattctggtgtgtcgttgatattcgtgtagaatggcacgacggtgttaaacgtattggcaccataagctaaccattgaataccggcaatttcagcaggcacgttgttgcgcacttgtaaaatatgcacgttatgattccggttaattccgattggccggaaacgagttttaacatcttcaggggcgctaccgtaaggatcgtattctgtattttcaaagtgagcgctcaagacgaacttgacgtcttcgattgaaatcttgcggttggcatggcagatgaatggtaaatcttggtccattggatcttgtttgatttctggattgaagtattgttgaccgtaccatgttcgtgggttgttataaaccgtatctttgattgaagcactgccgaaaatatgacggagattgtagccttcaaagtctggattcaagtggttatcatcaattaaagcttttaaatcagctgagcaaagcgtgtcggctgaatcaaagtcgaaatgattgatgttcatccggttaggggcaaccacgtatgcatcatcagggatgcgaacagcagcccagtgatgaccaccgattgtttcaagccaccaaacactgtctttgtcagaaaaggcaatcccgtttggttcgtatgtgccgaattcttcaaggagggcgcctaaacgttcgaccccttcttgagcactgtggatgtaaggcaagactaatgtcacaatatcttcttcaccgatgccaccagggacaaaaggatcaagcccttgaatccgggggttagtggtaatcgtttctgtggcagacatcgtgatgttttcactgttaatcccagcagctggccaaatcccgttcgtcaataatgagttaggaattgaggtatagcgcattgggttatcaggcaattggatttgaacgccgctaatcaccgcttgataattccggggttggtcttcaggattgaccacaacaaagcgttgtggatccaaagcttcgtggccatcatcatttctagaaatcatggttgaaccgtcgatggaagcttttttgccgactaagaccgtggtacatgaccctttaattggtttttgcatgtcaaaacactccttttatttattatccatagtataacgcttttggcgggaaagtgggggattgagcgataatcatgtgaaggaattgtttaaatgcaagtggttgagggtgccaagtcagttatcattggtattcaattcgttggtatcaacaaaaagattcggatgggtcgtcaacgtaaagcacaacatgcaactaatagggctgaacaacatgccgaaaagaaggccatacaatacagccgttttcagcaacaccagattaagaagcgggaaaaacatcggagacattgaaaaagaagaggtgggggtaatccgcatctcttccttttaatatcgtcagacaaaatatgaagtttagttaaataatgatatactcgatttgatttaaaggaaagaggggactaatgctgaagttagccgattgtttattagtgattgatctccaaaatggtgtctgcaaaagtgagcagcctgttgcgcgtcttaatcaattaattaaaggcgttaatgccagaattgatgcctatcaggcggaaagtcgcccgattatttttgtccaacataacgataagactttaattgctggtcagtcgacttggtagataatgccagaattgaatgtgcctaaaacggcaatctttgttcaaaaaacgcatgcggattcattttggcagacaaacttacaaacgttattgagccaaatgcaaatcaaatcgcttgaaatttgtggtgcccagaccaaatactgcgtcgatacaacgattaaagttgcccaccatttgggctaccaactccaaatggtagctggtctttcaactacaacggacaacgcctatatgacggctgaacagacaattgccttttacgaaaacgtttggcagaaccgttttctagaattactaaaataaacggtaatctctggtacaatggaccttatcatcacttaagaggagtatctattaatgtcaaaaacagctttaattacaatgcaaccaacagaccaaacgacagggacaacggtcatttacgcgccagataatgcggccaatcgtgtgtaggctgctaaacagtccaacgtacaactgatttcgattccaggttatgttcgttttggcgatcatatcgttaattttttcgttaaaaaaattgtgaaacaaggcgatgcttcggcatacagtaatatgttacagtttgtttatttttcacacatgatggcttacaacgtggcaaatacgccagttgaaagattagtttttgcaacgcaagatctagcgactaaagtattgatgcagtttgataatcaagcatgttataataatcaaataacagtcttagccaaataatatagaaaagccccgctcatctgagcggggcttttctatattatttttataagttaatgatttgtgcaacctcaccgtggtgtccgctagttgttaggggggcattaacaccgctgatatcgtctatgttggttacaatcaccatactggttgcttctttacccgcagaagcaagcgcagctaagtcgatttcaactaataactggtctgttgtcaccggatcgccttcttgaacgtgaatggtgaacggcgcaccgtttaattcaacggtatccaagccaaggtggagtaataattcaacgcccgttttggttgtaatcccaagtgcgtgttttgttgggaaaacactagagataataccgtccactggtgagtagatatgactatcactagggtttactgcaaaaccatcacccatcatttttgttgaaaaaacggcgtcggttacttgtttgagcgggatgacgggtccatctacaatagcgtgtaattcgagttctttgggtttacgtgagaatagtttcataatgatgactccttctacttagtaaaatattcgctgataacgttcgatgaatcagctaattggttcgtattagcggtgaaatcttgttctaagaaactgtaatagagtaggtcgacagcgtaaagctgtgcaattaatgaagtcgttgccgcgcttcttagctgactgttttcagtactatcatcatgctgtaacgtgatggttgctaactgtgcgatttgactttgattattatgagttaaaacaataattggaatattaagttgttgtgcaattttagcaagttgcagaggctcttgtttttcgccagagttagaaattaagataagtgctgcctgtgttttctgtgtggttagtgctgctgccagtagatgcgtatcaagtgattgaatgacagatttaccaacgcgcagtagtttttgttgtaaatcctcagcggcaacgtttgaagcaccaagcccataaatgaaaatggtttgtttcgagtggagaatcattgcggattcttcgagcgcgtcattcttgagccgatgattggtttcagtaatcgcttggttaattcgaaaagttagtttattttttaagtcagttgttgtatcggtcggattaatttcatcgaagagccgttgatcggtattcccttcagatgaaagtcgtaatttgagtgctggaaagccaccttgaccacagagtgttttaccaaagcgagcgacagtcgctgcactaacgttagccgcttttgcaaacgcactagttgtcattgtcggtacttgtactggatgggcaagtacgtattgagcaagccgctgttctgttttggttaaagttgggagtttcttttgaattgaaaaaagtatgctttccataaaatcagcgtcctttaaaggttatttttccattgtagcatctttgggaatgccaaagaaataagttgcgacaaagccaccggcataagctgcgagcaagcctaagatataagcgaattgatggccgtttgtaattaaaggaattaaggctaagccactaggtccgatggcaatcgcaccaacgccgcccattgcaccaatgacggcaccgccaatcccaccaccgatacaggcagtgatgaatggtttccctaatggtaaagtaacaccgtaaattaacggttcgccaatgccgaggaagccaacaggaagcgcccctttaatcatatttgtgagttctttattcttacgacaacgaatccaaagggcaagtgcggccccaacttggccagcaccagccattgctaagatgggtaaaagtaaagttgaacctgttttgttgatcatttcgatatggattggtgtgaggacttgatggagcccgaacattaccattggtaagaagagtacaccgagcgcgaaaccagagaaggcacccccgacattcagaatccaattaattgagccgacaagtgaatttgaaatcacaccggctaccggcataacgatgaaaattgtgaagaccccaattaataataatgaaattgtaggggtgacaataatatcaattgaatctggaataaattgatgcaatttcttttcaaccaatgagagaatccaaactgcgaagatgacaccgataatcccaccttggcctgcagataaaggatcgccattgaagatattgtgtaatggcaacttaggatcaacaccacttagaagtgtaacagcaccaatgacaccacctaaaccaggagttgcaccaaattctgtggcactgttaatcccaacatagattgcgagataagcgaagacgccgtttttgatgacgtttaagatggtaatgaattcagaccagtttgaaccaagggatccagcgaccatcatgtttgatagaacggcggcaattcccccgattaaaccagcgccgacgaaaaccggaattaaaggaacgaaaatatttgaaatcgactttaagacccgcttggttggcgtactcttttgttttgctttttgttttgccttaacttcagcggcttttgcttcgactttttcgcggtcggtcattgttgcggctgtggcagttgtggtgagattttctgggaagggttcaccaagtttaacaccgacttggtcgaccatgatttgggcgactttattgacaatcccaggaccaacgacgacttgaagcgtgtcttcttcgacaacccctaaaacgccatcgattgcttttaacgcagtcatatcaacttgatcatcgtcacgaattgtcatccgcacacgtgtcatacagtgaattaatttagcgacgtttgcgggtccgccaacagcggcgtaaatttctctggctaagcgtacttcttttttttcagtcataatagtgcctccttaaggtttgttattgaatagtttgacgtacaaaaccgtgtgcttgtgttaaacgttctttggcttcattagccgataaatccgttaaaatcataacaattgcgagtttaacgtcttcgttggcggcgctaaattgggttgccgcaacatcgtaagtacaatcagttgcagccatgatgattcgtttggcacgttcaactaatttttcgttggttggtttcacgtcgaccattaagtttttgtagactttaccaattccaatcatcgaagcagttgataacatattaagcaccaatttttgagcagtacctgatttgagccgggtcgaaccggttaaaatttcaggaccaacttcgacttctatattaattgtggcatgttggctgatgagggcatcgaagttgcaagctaagctgacagtactggcaccaatttggttggcataatcaagaccgccgatgacatatggggtccggccgctagccgcaataccaactactgtatcgttagcggttaagtggattgcttccaagtcttcgcgacctaatgtcggtgaatcttctgccccttcaacggcaacggtcattgcttgcataccaccggcgattaaaccttggaccagttccggttctgttccaaaagtagggacacattcggcggcatcgagaacaccaagacgaccgcttgttccagcgcccatataaattaagcgtccctcattttggaaactttgaatgataacttgaacagcagcttcaatattggggagtgcttgtttaacactttctggcacattgtgatcttcttcgttcattagtgtgagtactttttcaattgaaagttcgtccaattgcattgtcttttgattacggttttcggttgttaaatgacttaaatccatattaatcaatctcctttagttggatggcttgtccagcctgaatgaatggcagtaatgcgtgatctttttggatgacttttccaagaacgttaacacgagaatctgcgggtaggtcatgtttggtaatctgtaactcgcccatataacgtccatagtcttggttatcgagggtgatgctgccacgtaatcgtactgatgtctgttcaggttggattgtggtctgacaaagtggccggccttcttctaatctgatgacatcacgggcgacatcgcgccgattatggaaatgttggttaaaaagataaggggggcagggggctgacttaagcatgtacaaggttatgacgtgttgatggtagaatgcatcaaattgcgctagagtggtttttgctaaagttggatcaccgatgaagaccttatctgtttcacagttgaataaatcgagcgcactagcaagcggatgctgataacgatgggcttccaaagtgggtaatccttcttcaagtggtccgcgtaaaatgccatcaccaggaacaaaagcttgaatggttaaaccttgcgttttaagccactgatttttttcagtaaaccaggttcgttctaaaccggtttcatttctagggtaataattatgccaagcttctatgttagcgaagttggcaccagctgcgcgtaaaacggctaaatcttgttcggcaattgtgcttgcgttgagggcaatcttcaaatattgtgataacttagcaatggttgaattatcgatgccgaaatcaattcgcaaaccagtaatcccaaaggacagtattgcggcgggatcgttaagtgagagaccaactgctggtaatgaacttgtttcaatatcaatcatcaattgtaagtgttcttcgcgacacgcagtgctgagtgctttgattctagcagtgtattgtgaaatgtcatcttcaggaatatgcatcgacgtgaagacttctgtgaagccagcggcgtgcattttttgaaggttcatgcggtttgctgaggtgaacggttgattaagatagatagaaaaaccaaacataaagcaactcctttctttttaaagcgttttctatagatgcagtatagcgctaatgaaattaaatttcaataaaaaataaaaaaataaatatttagtgaaattaaattcataactgtaaccagtgatgaatgtaacggtttccaaataaccgtttacattttactaaaagtttagtaaaataagattgcgatctaaaagaatgcgtttacaggatagttcttgtacagattgatttatttgtatggtgtaaatagtaaacgtttactaactaaaagagaaagaagcgactaggatgaacgacaacaaaattattatcgatccagaccaatttgctgcagcaattatcgctgggaatcccaagcaaacgaatgaagacaataaggtttatatcaagcgtcaattgacgttatatctagaatcagttttactcgccaacgattttaattcattggaagaaaaccaattcggctcagccaaagaaaagcaacgccaagcgattttggaaaaaattatcgaacatcgctatcactagagtgcgtcatcaagcgggataacccgagggttgtgcttgatgaaagcatgtttacaatgaagaaactatcgaaaggaatctaaagaaatgaaaaaactaaaagatgttaaacagtatagttcttacgcttttggggcctttgggcatgacgccttttatgcaacacttagcacttattttatgatgttcgtcacgagtcaattattcgataccaaaaatgcaggctttaattcaaaaatgattgcgtatgtcacttatacaatgatggtcattcggattgttgaaattgccttcgatccgctgattggtggagtggttgataatacacggacgcgttgggggaaatttaagccgtggttactggcggggtcaattattagctctgttggcttggccatgatttttaccaactttggagggcttgcgacaagtagcccttatctttacttagttctttttgcaatcgttttcgtcattttagatatcttctactcgtttaaagacatctcgttctggtcaatgttgccagcgctgagtgttgattctgaaaagcggacaaaatttggggcgattgcgcgtttcggatccactttaggtgcacaaggggtcattatcgtgatcgtgccaatggtggttttcttctcgcaactattttctgggagtcatgggagtgaacaaaccagtgccgggtggttcggttttgccgttgtcattggccttgtttcattcttaggcgctttagcgaccatcttaggaaccaaagaagaaaagagtgctattcgggaaaatactgaaaaggttcggttacgtgacgttttcagtgtgattggtaaaaatgaccaattaatgtggttatctctttcatatttcttatttgcctttagttatgtgattacgaactcactgcttttatattattttagatatgtcatgggccgcgccgcagcgttctcaacggttggtgtgattactgccatcttagggattgtgtcagttgcgttgttcccaacattggttgctttaattcatcgccgggcaatctatattggcggaatcgcaatgatgatgcttggttatatcctcttcttgtttgctggaagtaacttggtcgtagtcttaattgcggtcggcttattcttcttcccatatccactggtctttttggctgctttgatgacgattaccgatagtgttgaatacggacaattgaaaagtggtacacggaatgaatctgtaacattggcagtgcgacctttattggataaactagccggggcttttgcaaacggcgtcgttgtaacggctgcgattcatgctggcatgactgggaatgcgaaaccaagcgatatcactaacgcggggttgttgcaattcaaaatgtacatgttcttcattccaatggcgttattggttatttcagcgttaatcttcatggctaagattaaattaacggaagcaaaacatgctgaaattgttagtgagttggaacggaaattagattaataacaaacaaagcgtagttagtctatgcttgaaccagaggctgcatcaaaagtaattttgatgcagcctttttatggctgattagtttatgggcttaacttgacgctgagaatgccgatgacttcttggttaacagtgcccaattatttgaaccagtcgtcggtcagtcggtagattgggtgctattcagaactaaaatcgaaagagccggcggaacggattctgcttttggtttgactgaagatggtgactatcaatacaagacggcaaaagggcttttttagactactattatcaaaatgtcttctttcaatcatgtaataaattgtatcgaagagcgattattgaagctgaagcattgcggttcgatgaatcgctgcgtatcggtgaggatttaattttcaacttgcagtatttgcaacattgccgagttgttaggcatcgggcagcgtttttatatgtttacgagatagggcatgctgaggcggctacgagtaccctaaagccgcagtggttctcagttaacttagcagctctgcacatcattgagacgcaattagtggctggaattgcagaagtggatcgcgcagcttacacacgatttttaaagcagtatgtgcggaccttttttagaatgttaattgtttttgatcagcgcacactgactgttcctgagcgacaattcattcagacgcaattgatcaatttagaacgtggtttaccaaccggcacatcccggtggctacgatggcttaatcggtcgcacttagcgccggtcatgctagttggcttacgtcggttaaagcaaaggttaaaataaaatgctgtccgccagaatcgaacgattcaaaagggggacagcatttattggttcatatctaaaaaaggatgcggtgggcgtttaaacaaaggggaattgactgtgaaaaagatcagtatcgtgattgtaatcagtagtattgttgtgattagtctggcggcgctaggtttttatttgcatcaagaggataaagctgttgatgcgattaaaaccgggtctagtcgaatttcaaaacaaattgatcagcgaaagccaatctcgttcctattattaggcgttgacacaggcgcggatgggcgcgttgatcgtggtctgtcggattcgatgatggttgcacttaacccggcgtaagaagcaacggtggtctactcgattccgcgtgattcattggcagagatggcagatgaccacggcggtaatattcagaaaattaatgcggcttatgaaattggcaaggctaagatggcgaaaaaaacagtcagtcagtttttagggctcccgattgactactcggtgacggtcgatatgggcgcactcaaagaattggttgattttgtcggggggattaccatcgatacggtgatcgacgttaatttgaatggacaagtgattccacaaggccaccatcatctcaatggtgatcaggcgcttgcttatagtcggatgcgttatcaagatccgcgcggggactatgggcggcaattgcggcaacaagaagttttgaaacaggttgcgcaaaaaattcaaaagccaaaatatttgatgaacattggtgacttaatgactaagcttggtcagaaaattagcactgattttacagccgaccaagtgaagcagttgattcgcaactatcatcaaagtagtggtgaaattgtcagcagccaattgctaggtaaaacggcgtggcttaacggcagtacctatcaaatcattagtacagaagatttgcaggctgcttcgaatcggctccgtgaaaatttagcactgccggaacaaacgttaaccaataccgaaacgcgacttaatgatatgaacccggccttttttgatgatgagtcgccaacgacttacttcaacgtgcgcggatataacgtgacacggtatacaaataatacggattagtgttgtggtcgaagtgcgtaggtttgggtggcgatggcgttaacgaaatcaacatcatgctcgataaataggagggttgggcgttgctcggcaattagagtttgaacttgttcacgcgtgatgacgtcgaggtaattcaacggttcatcccagaggtaacagtcagcctcttcacagagcgaacgtgccagtgcagctttacgtttttgtcccatgctcatcgtttctagacggtgggtaaataaatcgcggtcaaaacccagtttgcgtaacatgcttagcagttgttcgtgatcaacctgtttcgcagcagcgaagtcggccagtgagccgctcagttgatcgaaatcttgtggaagatacgagagggttaagtgcggattaaggtgcagactaccgctggcaatgtggtcagttgcgggtaatgcaagtaacgccttaatcagtgttgatttacctgcgccattaatcccagttagggcaacctgttgaccagtttctaaggtgaatgagagtggttgattaaggatgacgccgtcttgttgtaagacaagttcatcaacactaagcacattttgaccgggtttgaggggtcgctgattgatggtcagtggtgcagcaatttcaacgtttttaaaaagttgttgttttgcttcgattgcttcttccgcgcggttggcaattgtcgtcgcccgtttcataaccttagcggcgcgatgactgatgaagcctttatcgagattggcactttcagttttgacactggcggcgtttttccctttttcagcttcgtgggaccactgcgctttttgttgtgctgtttttgtcagccgtttgatatcgcccttgagttgttgattctgttgttgctcataagcagcttgttggtcgtgggcggtttgccaagtttggtagttgccttggtgaacggtgatgtcggcacgattaatcgctaggacatggtcgatcacttggtttaagaaatggcggtcatggctgacgacaatgaagccggctttttggcgtaaataattggcaacgacttggcggccttcttgatccaggtgattggttggttcgtcgatcagttgaaaatgatagtcgtcgatgaatagtaaggcgagtaacattttggtttgttcaccaggacttaacgaagcaaatggttgccagacgatttcgggtgcgacttgtaggagccgcagttcccgctcgacttgccagaaggttgaattgtcgaggttacctagctgcattagaatatcgtgtgtgagttgcgtaggttctgtaacagtctgtgggaaatattgaaaatcgagattggtaaccaactggccatcaaatggtagttggtgttgaagtaattttaataacgttgttttaccgcgaccattgcgcccgattaaaccgagtttccaactggcgtcgaattgaagcgtgacgtgatcgaacaacggttgtgtttgatctgaatagttaaatgtgagtgctttgaattgaattgtgcccatgaattatcacctcattgattgaatgagattggcccagttgtcgttaaaaatgcacaaaaaaagacgcaataacagcgtcttttaacaagtctttaggtaactgacctgaaaattaacgcaagcaatctctaacggcaatcggaaataaacggtccacgcacgtgcatgaacagttcgtaccaatcgagttgtcagaaaattagcatgcgattttcaatgccagtcacatcctttgaataagttaaatttgattctagcagattatttttagaaaaacaacttttaaaataatcctttacaaatagatggttatcccctatactaagtaactaattaataacaaggagggtctgtcatgaattcaatgcaacgtgttgcctttagctttttctttaagatacccagtaatcgactggttgattaaggagaaggcatttgagttgaaatgacaaaccttaatgaattggaagatggctgggtaaccccgagtcatcttcctggtggggctcactagtgaagactagtgggctcctttttttgttattaaatgagtgcgacgaagcctggtaggcggcgagtaatcgcctagtcgagtgcatacaataaaaataggagtggttaaaatgggattaatggcaaagatgttacgaaaagaatcactggaacgttatttacaacaagatcagcggttggccaaaacattaacggctaaggatttaattgcattgggcgtgggggcagtgattgggaccgggatttttatcttaccgggaacgattgcggcgttacatagtggcccggcaatcacgatttcatttatgattgcggcggccgtttgtgccgttgcggcgatgtgttacgccgaattttcatcggcattaccagttgcgggaagtgcttactcatatggcaatattatttttggtgagttaatcggttggctgcttggctgggctttattcttggagtatatgttgtcagttgcggcagtttcaactggttggtcggcttattttgtatcatttatcgaagggtttggcatccatattccgcatgcaattactggcccgtttgatccggcacatggcacttatgtgaacctgtttgcgatgctggtagtgggcttgattgcgacattattaatgcgagggactcgttcatcaacacgaattaataacatcatggttttgattaaattaggcgtagtgctacttttcattagtgtcgggattttctacgtgaaacccactaactggcaaccgttcatgccgtttggggtaagtgggattttcaaaggggcatcactcgtcttctttgcttaccttggctttgactgtgtgtcagcatcggcggcagaggttaagaatccacaaaaaaatcttcctatcgggattattgggacgttaatcatctgtacgttgctttatatattagtggcgtttgtcctcacagggatggtgtcgtaccgcgaattggacgttgctaatccggtcacattcgcgctacaagtcgtccatcaaaattggtttgccggtctgatttcactcggcgcattagcagggatgttcacgatgatgttgacgatgacttacagcagttcccgcctcatctattcaattggtcgtgatggcttattaccaaaagcacttggtaaagtgactgcaaaacatcaaaccccaactaacagtatcaaaattgtgacggtagtcatcatgattctaggcgggttcgtttcactggatcaattgactaatttggtaaacatcggcacattggtggcttttttctggatgtcgattggggtcatcccattgcggaagcgcaaggacattccgaataaaaatgggtttaaagtcccattttacccagttttaccgttaatatcaggagcgctatgtttattgatgatgtttgaattgccaaaagtcacttggattgcagcggcaatctggtttgtcatcggcttagtggtctactttacgtatgggattttcaatagtcgcttaaataatgattaaatcagcctcaaaaagctgacgttcacccgcagaaacgctagaataaaacagaggtgacgactgtggtaaaacataaacggctgtggattggtctaataggaagtgtcatctgcgtcctcggtgtattagggacgtatttcgatgctggtttgtatcagcaaccgattattcgggtaacgcgggtccagacaattagccgtgagaaacagactgatgagtaccaaaatgaagatacagaagtagtccagcgggtcacgggccaatttttgaacactaagcaaaaagggcaagtgattacgctacgcaatacgtatacggcgtcgcaagcgatgtcgacgcggtactataaaggacaacaagtctttttacaccgtgatcaatatttgaaaaagtggaccttaaacgagcctaagcgcgatacaatcatcgttggcttaacactgttgacgtttagtttcctattactaatgatgctcaagcgcggattgatgacgctaatcagtgtcttggtcaatctcgtcgcattcgtcttaacactccatttaaacgcgatgacgggtggacggtggttattgccgattatgtgtggcttagcggtcgttctaacgggtttaacgctacttttagtattaggactcaaccgccagatgcttgtctcatatggcgcgacaattggcgcaacgttcctagcactgtttctcagcatggccgtcttgaaattaaccggcgatcaaggcttgcattatgaaacgatggcctatgaattacagccgtataaaacggtcttcttagcggaagtcgtgctcgggattttaggcgctgtgatggatgagacgaccgatatttcatcgtcactccagcaattagcgattgaacggccaaacgttacgaagactgaattgtttaaatcaggactcgcaattggtcgcgaaattattggtccgttagttaatgtgttgttctttttagtcatggcggatgcttttccaattattttattgtatctacgcaatggcaacacaattgcgtataccttatcgcgaactgtcacgttaagttttacgcagacggtgattagtgcgattgggattactttggcggtgccagtaacgagcttgttggcaagccagttagtgcgggtgagacgcctatgatgttgctaacgggaattttactgatcttattagtgctggtttgtggttggcaagggctgacgattttcttcagccttggtttgaattttgtcgtgattatattggcactggtcttggtggcgggtgggtttgaaccgctgattgtgagtggtctgttgagtctgattttgttagcgacatccatcttcatgaataccaagcagccattaacggccaagacggcgtttgtgacgtcgttaatcgtggtggtgggcttgctgatcattattgtgcccctcagccagttagcagctacctacggctttggtgcggaagatgcagaagagattgaaggctttggactcgcaatcggcttgtcgttccaaaaaattagtatcatgatgatcattctgggcagcttaggggcaatcgccgaaacgagtattgcagttgccagtggtttagtcgaaatcttagaatacgacgcgcaaatgggctccaagcaactctttaaagcggggattgcgatcggtgaaaaaattattgcgacggcttttaacacactgttctttagttttttcggtagcttcttgtcattaacgatgtggttcattcaactcggttatccaattagtaaaattgtgaaccataaaattttaattggtgagggactcgcactattaatcggagtgattggggtcatagcaaccgttccgctgaccagttggctcctaaactatttcagaaaaccaaaagacgaataaagttaacttgaaaaataagtcaattcagattagaataatagaatatatgcacgaaaggaggaaacgcgcaatgtcacaaaacttacatgttagtgtttctggtaaccgtcgtcctgttaaccaaaacaatgctaaaaaacgtaacgctgaaacagctgctgtattgaacttcttgaaggaacgtaaatcagctaaataattataatgaatttttttcaaaataatgttaaaagaccatctaaaagtcgcttgaaaagcagcctttggatggtcttttaatatggaaaataaatatattttaaactaagtttaaccacaaaaaaagagctacatcctaagatgtggctctttttaaatacatatttttgattaaaggacgcgaactgcgaatgaaggcatgaagtagcttgagatacttgctgtcttaactgattcgccaggttgtggtgcgtggacgtatttgccaccaccgatgtagattgcgtcgtggtatgaagcaccagcgccaccccagaagaggatatcgccaggttgtaagttatcaagtgagacgcgttggccagcacgttcttgagcagttgtgacacgacccaatgaaacgccagcttgtgcgtatgcgtattgcactaaaccagaacagtcaagaccaacaccaggtgttgagcctccccatacgtaaggtgtaccgatttgtgataaagcagcgttgataacagtttgtgcgttaccacttgcttttgtcgttgtattcgtttgtggtgcttgttgagttgttgtagcttgagttgtttgttggctgctttgagttgtcgttgtttgtgtttgagcaggttgtgttgttgctgctggtgtacttgttgtagcagccggggttgttgcttcagttgttgcagcaggcgctggtgtttctgtagcaggtgccggcgttgttgcttgaggagcagctggtgcttgaacttcagttgtagtggttgttgcaacaactggtgtcactgcaggtgcatttgtaattggtgtgacgccattcaagttagggttgtttaaaacaacgtagctagcaggaacccaacctttgctttctaattggtaccaagttgtgccgtttaaatctttttgatcaatgacgtttttagttgtgccatatgttaagtattcgccagttggttgagcagcagttgtgtcagcccaaacagttgttgcacctgattggaagttagctgttactgtgttcttaacagcggttgttgttgcagctggttgagcagttgcatcgccggctgtaatgaattggcttgaaacccattcgtcattaccaagtttgtaccatgtttggccgtaaacttgttttgtgtcttggattgttacttgttggttagttgccaagtaacgagcaggtttttgacctactgctgggctagtccaaacggttgttgccccgtcagcgtagttaaccgtaccatttgttgcagcttgggcatcatttgtttgaagacccatcaatactaagccggcaaggccaaccattccagaagataagtaagtcattttttgttttttcatgtgtttgttgtgctccttcgaaaaatttttttaagttgtttgaattttgaattaatttagtacgctgattagcatagcatctgaaagtaacaaacatgttacataatagttagagcgctgttacatgtttcttaagatatcggcgattaaaagactaaacgtaagcgaacgtcaaaaaagtacgcatatcaagaagatagcgtactttttaggaagtgtcttaagattattggagtgtaccggtttgtgtctgatctgtaccggtctgagtattactttgtgtaccagtcgtcccggttccggttgtggtatccgttgtcgaagtccccgtcccagttccagttgttgcaccagtgccattccccgttgccgtgttagcagcatagcctgtcgtagtttgtgtattggtagctgtgttttggttagttgttgcttgattagcggttgttgtgttttgcgtggttgccgcttgggtattgttagagtaagtgttgtattgattttcagcgttcttaacatacgccaagtacttttctttaaagccgtcatgggttgatttattaatcaaagctcggacataagggaagtcgctagcagataggttagctggaatatgcttgaggttgtcgtctgtaaataagttccggacagctgccatagccgctaattgatttttagcttcttgataatcagcaagttgtttggggtggtcggtatagtccgtttcttcaccaagttgtgcatcggctttgacaatcccatctttatcgaaaaaggcgcttgttttaactttgttctttttcttctttttagcaggcttttcagaagcaacactttcagattcactagttgctggttgcttaccagtaatcttatctagatctttttgggcagccttgtaatcagcctttgcatcagcgctaattccgctcatataaaggttgggcgtgatttgtttgtcgagtttgtcagccgcagtgataatttggtgttgtttattggctgttaacttcgcaggatctttacgggaaccatcactatagagttggttcactttttggacgtattgatcaattttttcttctgttttagttgcggcagctggaatttctgttttattctgacagccagctagaatcatgaaacagctggtcatggtcagcaacagagcaagtgttaattttttcattgagaaaccaccttgttgttagttattcatctaataatatatcatgaaattaggagcgctaacatggtcgtttgacgataattccgaaatcggaaattaacgtgaaatccaatattgtatagaaatcgcaataaatgcgggggttaaaggaaattaatcaacaaatcaggctatactttcgcaagtgagaagcgtacactatggatattaattatgagaaaattttaatcaaacgtgaccgatgagttcaattaaagtggtcatcagagggagtgcaacttatggaatcagcatgtacatcaattttagttggtaaaaacgcatcattggacggatcaacgatgattgcgcgtaacgacgatacttttttacctttaacaccacaacggtttcacatcaatccagctgttaaagggcgtaagggtgctaaaattaaatcttggttaaacgggtttgaagccgaattacctgagaatggctaccgatggcccgctgttccgaatgttgattacaaacataatggttattatgatgaaagtagtattaacgaagttaacgtggcgatgagctgtaccgaaagtacatatggaaatgaaaaagccctcgcttatgatccattggtgaaagacgggttggatgaagattgcatgcaagctatggttgcgccgtacattaactcggcgcgcgaaggggtcagctatctcggtaatttgattaaacaatacggctcacccgccggcaatagtgtgctctttagtgatcacaatgaagtgtggtatatggaaattgtgacagggcatttatggctagcacaacggattccagatgatgcttatgcagttgccgccaaccaagtggcgattcaacaagttgatttcacggatgccgacaattttatgtgggcagaaggcattcaagaatacgttgaagcccatcatttgaatccggataaaacgggctggaatttccgccacatttttggcacgatgaatgaaaaagaccggcactataatacaccacgggtttggtacgcccatcatttatttgatgctgattttgatatgtcacccgaatcggctgaattaccatttattcggcgtattgaacataaaattagtgttgaagatattgaaatgttgttaggctcacattataatgaaacgccattcgatccaatggggcatgggactgatgccgacaagtatcgttaccgcccaatcggtttgaatcggacgcaaaatgcacatattttacaattacggaatgatgtgccaaaggaacaagcggccatcatgtggatcacaatggggatgccaacgtatacaccgttcattccatttttcacgaatgcgaacgatacggatctaagtttcagcgaaacaccaatgaaatgggatatgaagagtgcatattggttataccggacaatttcagtattggtggaaggccattatagccagtacattcaaggcaatgtagattacttaaaccgttgtaagcaagaattgcgaacgatgattgaagccattcaagtggaagcacaaaagtatcaaggcgctgccttaacggagtatttgactgagcaaaaccatgcgattgttaagcagatggcgactgaagcgacctcgatgattggggaactcgttatgtcgggcattaatttatcgaaattgacgttcaatatggatcgtaacctataagatgttattaaaagaagttattaaggatgaaaataattttatctttaatgacttctttttatatagtcacgacaaactaatatagtgggttgatgattatatggtcaattgaattgttgcacatcaaatctatttatagctatttaatgaatcgagtggtttcttttctctcaaaatatgctaatatattgatagcaaaataaattaaatccgttaattgtttctacgcatgacagatcggttagtaaagggagaaaaggttatgacagcaaaagcaacaagcaagtattctgatgattgggaagtagtaacgcatctttcattgatttatcggtggattgtcagcaatttaagcgactttgtcagtggagaaagtttaaattacaaagtttcttttgaccaatttttaattatgtacgaaatttcaactaacgaaaacttaacaggtagtaagttagctaagacgatgagtgttagtcgttcagcaatttcacgccaatgtcggttactgaaagaaaatgggtacgtggttgaagaacatcttcaaacagatcaacgggttaaatttttgagcttaactaaacaaggtcaagacgttttagaccggttggtgagccgctatgttgaaaaataccgtgaaatcgaagcacaaatgggccgtgataaagtcgatggtttgattcgattcattgatcaattctatttagatgtcattgaaccaagtgaataccaagataacaagatgggccgttcattcctaaataaagtaaagaaaatgaacgaagaaagtgcagaatagttattatgaaataggaagaaccgcgtgggggcggttctttttttatggataaaacgtgctttttggttgcaacaacttccgcttaatctaaactagcacttaatcttaaaatcgagattaagcgctagtttgtattaatgctcagttgctgaccgcaaccaaatgcattcttgccttaaacgtgctttcatcaataacttcctgtgctttgctacacttatcaaatcggcgattgcatcgccaattcgctaagttagataaatgctcagaagttacccgttgatgacgcactctgatataatagggcttgtttctttttatgaaattgcttacaattaagccatgaacggattatgaaagagtgggagtcgatatcatggaaaaaattctggctattaatgcaggtagttcaacactgaagtggcaattatttgaaatgccgtctgaacgagtaatcgctaaaggaatgattgaccggttaggcttatctgattctgtattcacagtgaagtatggcaatcaggaaaagtttaaacaagtccaagatattacgacgcacgaacaagcagcaacgttgttattaacgcggttgaaggaattaaatatcgtaacccatctcgatgagattacgggggttggtcaccgggtggttgctggtggagaagccttcaaggactctgcagtaattaatccggtcgggcttgatgagattaatcgtttggctgaatatgcaccattgcataatccaacccaagcttattacattaaaattttcactgcattattgccaggcgtaccggaagtggctgtttttgacacgtcattttacagtacgttacctgccgaaaactatttatacagtattccgcaagcgtattatgaaaagtatggggcccgtaaatacggtgcgcatgggaccagtcatcggtttgttgctcatcgagcggctgaaatgctagatcagccgcttgaaacgcaaaaaatgatcacgttgcacttgggcagtggtgcatcaattaccgcgattcaagacgggcacgctgtcgatacatcaatggggttcacaccacttgcggggattacgatgggcacgcgatctggtgatattgatgtctcattagtagcctttttagctgaaaaattaggtaagacaatgccagagatgatcacaattttgaaccataagtctggcttattagggatttctgaactatcaccggatatgcgtgatttagaagaaaccgctgactcacgaccacaatcccaattggcgcttgatatttttgtcaatcgagttgtgaagtatgtcggttcttacgtagctttaatgaatggagtagatacgctggtctttactgccggtagtggtgagaacggcagtgaattacgggctgccatttgtgaacaactcgcttgttttggtgtagaattggatgaagataaaaataatgtccgcagccaagaacgcattatcagcagtgatcaatcacgcgttaaggtcctgattgtgccaactaatgaagagttgatgattgccagagatgttatgcggttaaaataagggagttatgcaccatgccacaaaaaccactatcagaatatgaagttgagattccccgattgagtgctcgattagaagatacaccagccacaaaaacctttttcgacgcactaacaccaggctatcaacgcgaatgggcacgttatgtttacggcgctaaagctgaagaaacacagcaacgacattatgttgaaatgtgtcaaattttagatgcaggttataaatctaaacgaggatacggacaagcaaagaaaaaataaattaaaaaaagattaatcaggccaaatgcgcgccagattaatcttttttgtgttctttaataaagcggttacaaaaaagagttgaattctcaaagaagctcctttataataatcaccatgatagttagtaaaacgttttactagcctagaataaaggacggaggattgaatatgaatgctgtcaatatcttaattggattaatgccgatgattggttggggattgttccctgtgatcgttggtaaaattggtgggaaaccagcgagtcaaattattggaacgacacttgggacattaattctggccattattgtggctattttccgcgggacaccgattccagaaaccaaaacatttattttttgtttaatttcaggggcttgttgggcattagcgcagattatcacctttcatgtttttgaaaccatgggtgtttctagaacgatgccaatcacaactgggttccaacttgttggggcatctttgtggggcgtcttcatcttgggtaactgggcaagtacacaatcgaagttgattgggttcacagcgattattctaattatccttggtgtttatttaacagcctggagtgaagatcgttcaagcgctagtaaaaatggcgcggtgcgtggcatcttgttattattagttggcgaactaggctacctagggtactccgcctttccacaagcagtacacgcggacggtttccaaggctttttgccacaagcattaggaatggcaattgtaggtgttatcttcggattaacccaaaccagcaagacttatcaacctttcaaagaagcaacttcgtataagaatatcttcagtgggttcttcttcgcgtttgcagcgctgacgtatcttatctcagcacaaccttctgtgaatggcttagcaacggggtttgttttatcccaaaccagtgtcattttcgccacaatcggtgggatttatgtgttgaaagaacaaaagaccaaaaaagaaatggttgccgtattaattggtttagtactcgtattagtggctggatctgtgacagcctttatcaaataaaaagtggggcggatttattatgcgaaaaacacaagttatcaattcacaaatttcaaatgtgatttcaaacatggggcattttgatacaatgagtattggcgatgctgggatgccggtcccagctggaacgcaaaaaatcgatgtggccatcgaaaatggtgtaccaagttttattcaagtacttaaaaatgttctaacagaattggaaattcaaaaagtttacttagcaaacgaaattaaaacagctaatccagcacaacttgaacaaatcaaaaaagtgattggtgagacgcccattgaatttattgatcacgcacaaatgaaacaggacttggggcaggccaaagcatttgttcggacgggtgaaatgacaccttattccaacattattttagaaagtggcgttgtattttaaccattaggagggctttcaaatgaaaaaagtaatcgtattagggtcaacaaatgtcgacacaattttaaacgttcagcgttttccacaaccaggtgaaacattagcaatggatggccgcgcagttgctggtggtggtaagggtgcaaaccaagcaatcgcagctgttcggtcaggtgcgcaaacagctttcattagtaaggttggtaaggaaggcgccgctgatttcatgctagatacgttcaaaaaagatggcatgaacattgatcacgttcgttgttctgaaacagctgggactggccaagcttacatcatggtggatgctagtggacaaaatagtattttaatctatggtggggccaaccaagatgtgacagtcgatgatattcatgaagccgaagaagccatcaaagatgctgacagaattgtcgctcaattcgaagtacctattcctgcaattattgaagctttcaaaattgcccgtgcaaacggcgttcaaacgattttgaaccctgcaccagcgattaaaaatattccagctgaattattggcagtgacggacatgattgtccctaatgaaacggaagctgaaattatcacagggattaaagtgactgacgaagcatcaatgaaagctaacgtggaagcgatgtttaagatggggattaaagtcgttatcattacggttggggcaaagggctcattctatgcaacaccaacaacaaccgggtttgtaccggcatttaaagttcaagcagtcgatacaaccgctgctggtgatacctttatcggtgctttaagtacgaaacttgaattggattacagtaacattgaagcagcaatgacttatgccaataaggcttcttcgattgcagtccaaactaaaggggcgcaaaattcgattccttatgaaaaggatattcagttataatcatattaacagcgtccatggctagccggctgtgggcgtttttattaatttgattcgggggagtgccaaaatggttcgaaaagtaacgattaaagatgttgccgcgctggcgcaaacatcggtcacaacagtttcgttaattcttaataataaaggtgagcgctttagcgcagaaacgattgcgcgggtcaaagccgctcgggaaagacttcagtatgaacctgattatttcgcgcaaaatatgattaataaagaaacgaagacgatcgcggtattggtgccggatatcaataatcctttttttagtcagtttattcaaggtgtcgaagaaattgcctatcaattcgatttcatcccattaatttatagtgcaggggcgcataatcagaaagttgatcattatttaaaggaattggttcgtcgaaatgttgacggctttattttggctgtccctcatttacaaaaaacaacgttggatagctatctgcaaaaacgacaaattccgtttatcttattagatcaatcagataaacaacatgcaggagatgaaattacggttgccgatacgcaaggtggagagttggccgcacggtatctcattgaacgaggccatcataaagtcggaattgttttaccagaacaacgagcttggaacatcgaacaacgattcattggttatcaagccgcgatgttgaaagcccaattaccagtggcggatgagtggcaaataacgacaccgttaacgaaattaggtggttaccaagttgcacgacaggtgattgatagcggggtaactgctgtatttgcaatcaatgatgaactcgctatcggattgattcgtgggttacgtgaattacgagtacaggtgccagaagatatctcagtgattggctatgataacatcgattggtgtgaatatgtcacaccaaaattgacgaccattaagcaaccgattttcgagcttgggcaagaagcaacacgtctattattgaaccggattgtggagcctgctattgcgccacaacaaaaagtactttcaattgaattagttgaaagagagagtgtacaacctatacatccctaaatccataaaagcgtgatccgcatgaagccttgttatcaggcaacttatgcggatcatgtttttttatttgtctaaaaatgaaaaaaaggcttgtaaatatgtcggaaagaactagacttaataagtcttaaagacctgtctaaaagactgattaaagagagaggttatgcgtttatgtatgaattgctgatgttatccgccttaatgagccggaatatgtcgggctataagttgcggattatcttggaaaatgcgatggtgcccagacggaaaatttcaaatggggttttgtatccgttgttagataaattggaaagcaaaggctgcattgggtttgaggaagctgatcaggattcacgtggtacgaagattgcgcacattactgaagagggacggcgctattttgctgaattaatggctaaaccagtcgttcatgatgcgaagtgggatgatgcttatcgttttaagatgcgggggatgcactacattgatgcagcagaacaagtcagcattttacaagatttctacagtgagttggctgaagatttacatgtttatagcggtgtggaaaaacatctaactgaattaaaagatgcggatgagacaatgacggattattattattggcagattcgttcaaccgatttcgtaatcacaacgatcaaagccaaaatggattggctacaagcacaaataaatgagatagagaaaatggagatagtaaaatgaaaaaaacaaccaaccgctggatagcgctggtcgcgatgagtctgggtgtctttatgggattgctagacgtaactgtcgtcaatgtcgctttaccaagtatggcgattgattttaaaacaacttttagcaacttacaatgggttttgaacgcttatacgttgatgtatgcggtcagcttgttgattgtttccaaattaggggacatgttcgggcgcaagaaaatttttatcatgagtatgattttattcacagcggcctctgtcgttaatggactggcaccaaatttattggtattagatatcgggcgcgcggtccaagcgattggtggctcgggtatgatgagtttatcgatggcactagtggcgtcgaactttgaagggcgtgaacgggggactgcactggggattttaggctccgtgattggtttttcaactgctattggacccttagtagggggctttttagtcgaaaacttcggctggccatccatctttttcgtcaatttaccagtcgggattatttcagtttacttagtgattcgcaatgttaaagaaacaccagcttatggcgcgggcgaatcaatcgattttatggggatgatcttgtcagcaattggtttattctccgggatttatgggttgattcaaaaagaacaacatatgcactgggattggacagatatgcgcattatggggtggttagttgcttccgttttaattttagcgcttttcgtctttgtggaattgaaagcaaaagcaccaatgatgaacttgacgttacttacgaatcgccatttcgtgggtgttgtgattttagctttctcattaggcgctggcatttttgccttagccgcttatcaaacgagtttgatgcaaaattacatgggttactcagccttttcaaccggtgtgcatcaactgccaatgagtttatggtcccttgttttaggaccattcacgggtgttctaggctataaattcggtaaaaaatggttgattgcttttggatttactgtttctgcccttggtttattaatttttagacaagtgacaacgactgattttacttatatgcaactcttaccattgcttgcgctaactgggttaggcaatgcgattatcaatccaatgatcaatacagcggcgatggataatattaatcctcaagaaatcggaatggcatccggtttattgaatgttttccgccaaattggaattaccgtcggtgttgtgattctcggtttatcacaaacgaatgcctacgaaacgagtttgaagactagctttagtggcagctcaatcccgaaggcggcagcaactggcattcagcaagcattggttgaagcaggtgctttttcaggacatgcaatcgcgtgggggcaacaattagtgaagacaccgtatgccgcaaaggtccaacaaattgttgtcacggcttttgataaagggatgatcgctgttgtaacgacgtcgctagtgctcatggtgattgccatcttggcggcgcttttcttattgaaagaaacgaaaacgactgatcgagcataaaaaaagaaggttcattattttctgaaaagataagactgtaaattgtgtagcaaacagtgtaaaatgaacagagtaaaaataaaaaaagtgaggttacttacacatggctaaattagtttttattcgtcacggacaaagtgaatggaacttatcaaaccaattcactggttgggttgatgttaacttaagcgaagaaggcgtacgccaagctcaaaacgctggtgctttattgaaaaaagaaggcatcctttttgaccaagcttacacatcagtattgactcgtgccatcaagacattacactatgcacttgaaggttcagatcaattatgggttccagaaatgaaatcatggcgcttaaacgaacgtcattatggtgcattacaaggccaaaacaaagctgaagcagctgaaaaatggggcgacgaacaagttcacatctggcgtcgttcatacgacacacttcctccactattggatgcaagtgatgaaggttcagcagcaaacgaccgtcgttacgcacacttagatccaaaagcaattcctggtggcgaaaacttgaaggttactttggaacgtgttatcccattctgggaagacgaaatcgctccaaaattaatcgacggccaaaatatcattgtagccgctcacggtaactcactacgcgccttaacaaaatacatcgaaaacatctctgatgaagacatcatggacgttgaaatggcaacaggcgaaccagttgtttatgatttagacgaaaacttgaatgttgtaagcaagaagaaattaaactaattattaaagagtgtgtttaaagcgggttgattctgagcattagcctaaattcgtgaataatcgacgttagtcgattgtttgcggattgtagctaagcgcaggagtcagctttaaaaagcatgtttaataagcttacacaaataggctagtccctcaagggatagcctattttttttgcttaaaaatgacacgttagggcgctactagggcacttcagctaaatttgatagctaacggtaatttaaaacattttgttgacaagcaactaaaacgatggtaatctttattttgttgacaagcaactaaacgaaactaaagaaggtttttttaaatgagtacattattagtaatccaagcacatccccatgttgaaaagagtttatccctagcggtagggacccgctttgtagaaacttatcgtcggacccatcctgatgatcaaattattattcgagatctatatactgaagcaggtgttccaccattgaacgatatgacaatggctgcatggcgtaaacaaaaatttgacgaaccaatggctgaagctgagaaaacactattacaacaacacgcagattggttagatgaatttatcgaagctgataaatatgtcttcatcaatccaatgtacaatcattttttaccagctgagatgaaacaatatttagatttgacggcggtcgcccacaaaacattcaaatacacaccgaacggttcagtaggtttgttagaaggtaagaaagcaatccatatccaagcagctggcagtgtttatcacgctgggggcaagtgggggatcgttaagttcttgttccgccgtttatttaagattaggagtaacgaaagttctgcacttatggatttaggcgatatgtatttaaccaatatgttgaaattctatggtgttaatcaagttgaacacgtctatattgaaggcgcggatgctcatgcagatcaacgtgaacaaatattagcacgggccctaacggaagcgacgaccaaagctaaagtattctaatttggtgtatactggtggtaacaattgatgagaggttaagcaaatggaaaacgaatcagtgatggcactctatcatgcaatcaagcaattacgctcagatagtgtcaacggccgcggtgttcaagaacaaaaatggttgcaaaatcagctgagtgatgagaacttgaaaacgatgattccgcagctatcaatcattgcattgcacatattatcaggattagaggccgaagaattaacaggtgtagcactagcggatcggttggcggttacgcgtggcggcattacacgcgccgctaagaagttgattcaaatgggcttaattcaagcgactaaaaaaccagatgatcagaaaaaaatctattattctttgaccgctaaaggccgtgtgattgcgcaaagccacgataaaatgcatgaaacgctgaaagcgcaagttattgataaggtgaccgaaaaatataaagatgctgaattgaagcaagcagcgtctttaatcaatgatttaatgcaatttgaacgcgatttttattgatgatattcaaataggctagtccctcaagggctagcctatttttttgtattaagttatcgacggtattttcgatttgctttattgttgcgatgatatagatacaaaagaaatgccagtaatactgtgaccagaatcctcatagccaaaataacatagaacgcaacttctcttccagcgtgaatttgccaaattggcgagaataacaaaaataaaaactgtacttcactaatccaggctgtaacaacactaatttgagtaatcttggttttgaacccgattaaaaaaataaataatgaaagcaagtaaagcaacacagtgacaaatgtagtcgtatctcgagcaaatattgcaagaatttcaaaagttactttagcaccaaagataataaagaaagctgaaaagacacagagacccacgatactaataataactcgacgcagtaccagtaaacgaccttggtgttagatctttgaatagaccattaaacataataagaacctccaaataaaaatcgcgcgttttataatcaagttagccaaatacttttagctaattgataaaataaaaaacaccaagacgaatctctgttatcattgatgttcctacacaaacaatgaaagaggttattgtcttgatgcaagaacagaataccacagtcagaaaaaaggtcagcacctaacttcgtttgaacgaggcagaattgctacgctgcacagccaaggctattccaatcgtgcaattgccagagcgcttaatgtttgtcatcaaacaatcaataatgaattgtgccgcggcgagatcgaccaagtaaaaaaagtgaatggtcaacgccaatattacgctgtatactcaccagaaacagcacaagctaagtacgaagctaatcgagcccactgtcatcgacctttgaaactcggaggattcggcacatcttggttacctggtggtgatggctttcttggtgaatgtaatcaaagatattggttacttctgcgcaaggaagcccagggctttttttaggatttcgttctcctcagacagcgaagccagtcgcttttccatcgctttgatttcgtctggcgatttaccggattgagttttggcctggccctggatccccttatgaactgttgaatagccaatgccatattctctggccagttgggcagctgattcgccttgcttatataggttgataatgttttgtttgaattctttgtcgtaacgagttggcatgtaaaaattccttccttttgagagatgatttattcattataccctctcttaaaagttttctcaggaatcagcttacatccagatggtcgtgatgccgattcagtcaactatgagctggccaagatctgtcaagaatacggatcaatcatgaagtcagttactgccgataatggcgctgagttctcggaagttggcgctgtacttaccggtgtcgctgacctttattatgcccatccatatcgttcctctgagcgcgggactaacgaagcgcataatcgaatgatccgccgcgatgtacccaagggtctatccatggatattttgggtcctcatgatatccaagcagttgagtcaaagctaaacaatttaccgcaccggcaaactggctatcaaacacccaaagagcttttctccgctgcttccgccggttaagttaagtccataaaatatgaatattaatgaaaatactgatttaataggatttatcgtgtggctaatttgttcttgcaatttgggagtcgaaaacaaatggatttcattcaagattaaaatgagttatattgtctttaaatataataaggattggtgatgatcatgaagattgttgtgattggctccgttgcagcggggacgagtgtggcagcaaaggcgcggcgaaatagtgaagttgatgagattgtcgtttatgaaaaaggtcaggatatttcttattcggtttgtggcatgccttattacgtagggggtgaggttgaagacctagagacgttaattccgcgcgatgcggcgtggttcaaaaaacgcttcaacgttgacattatgacgggtatcgaagtgatttcaatcgatgaaaaccaacaagcgctggtcttgaaaaactttgagacgggcgagttgtttgaagattattatgaccgcctagttttagcgacgggggccacgccacgcattattgcaccgttcgatgaagcctaccaaaacgtcttcacgatgcataacatggtagatacacgcgcaatcgacgcgtatttacagcaccattcagttcaaaatgtgacgatttttgggaccggttatgttgggcttgaaatgatggaacaatttcaaaaacgtggcttggacgtgacgttagttcaacgaagcgcgcaaattatgacccattttgatggtgatatggcctatcgtgctgaacaagttattcgtgctaacggggtgcatgtgttaaagagtgtaaccgcaaaacaagtgactgcgcaggatggtgtggtatcggcggtagaattgagtaatcagacgaccattcaaacggatttggtcctactagcacttggcgttgaaccacaaacgcagttggtcgaccatatgaagatagctaagggaccttcaggggcgttgaaggtcgaccaacaaatgttgacgactgtaccgaatatttacgcggtcggcgatgttgttgagagtttctccgtaattgatggctcaccactgtatcgaccaatgggttcgactgccaataaaatgggacgaattgccggcaattcattgactggcggtggcttaacgcaccgcgggattcttggaacggggattgttcggttgttcgatacaacgattgcacagactgggtttactgaagcagtcgcgcgagctaaggactatgatgtggaagtactctacaacattaaaccagggcatgcagattacttaaatggaaccgaaaacgtcattaaagccattgctggccgtcaaacgggaaaattattaggtgtacaaatcattggtaaagatggggttgataagcggattgacgttttcgtgactgccatcacattgggtgcgaaggtggccgatttattccatctcgatctagcttatcaaccactctatgcaaccactaaggatccagtgctctatacgggaatggcgctcgataatgcattgcatgggcggccgctcttgcctccagctgaattggagcaacgcttggctgaaggtgaacgcttccagattttggacgtacgttcgaagcaaaaatatgcggacgagcatgttgaacatgccattaacatgccgcttgctgaaattcgtgatcggttcacggaattagatatggatattccaactgtcacctattgcaataaaggggttacggctaatgctgctcagaatttacttctgaacctcggttttaaatccgtgtataacttgagtgggggcttcaaaaattatcaggtagtcaaagcctacttgaatgataaataatataaaaataccgctgacaattcgctgtcagtggtatttttttgcgttgttatagatttttggtgaaaaattgagttaattctgaaaaaggaataagcgcgatacgatcatataaatcgacatgcccagctgcttttacggttaataactgttttgattcgttagcactggcaaaggcggcttcactgaaatgtcgtgaccatgcctcttcaccaacaacaaagagcatggcacgttctgtgatcgtttcgaggtcgcgcaatggatagaaatctaatagtttagtaaaagttgtacgagtgggatggagtgtcgagttggctgcgccacgttgggtacgataaaagtcgtagaattcacgttcgatatcagttgagttttcgtccagttcttcaggtactccatgggcgtaagtggttgcttgacctgcaatctctaatgtccgggatcgtgaggattcctcgattaatgcgttaccgcctagtgcatcacgctgttcgcgaacaatggcacccatatcggttaagttaatagttgcaagtgctttaatacgtgcgtctattttgagtgcgttgagcgtgaaaccaccggccgaaccaattgcgattaagccaatacggtcattggcgacacagtctagagtggttaggtagtcagtggctgctgagaaattctccgcatataagataggggcaatcgcgttgcgcagagcaccgttactcccgccccaagcagattgatcaaatgaaacggttacaaacccttgttcagcgagcttaatggcatataggttagctgcctgttctttaacggcaccgatgggagcaccgatgattagtgctggaaaaacagtttccgtcgagtctttgggaagaaagacgttagcagttacttgcatttcatagatattcttaaaagtgacgggatgctgttcaacggctgaaccgatcaccgtcaacaatttcttatgaattatctcgatgtcaaccttatcaggctgaattagcacaaacagatgccgaatacaagcgatcacgatgtggtcggaaaactaagctgagcgatgagttaaagcaaaaaattctcaaccatttacgtctaagctggtcaccaggaatgattgctcacgaatttaaactagctactaaatctatttataattggctaaatcaggggagaattggtttctccttgaatgatctacctgaacatggcgtacgccaacggcgtaacgttgaccaacgatccaaatataatcaatctttggggcgatcaattgaacagcgtcccatgatgattaatcaacgtaagcgcatcggcgattttgaactagatacagtcgttggtcctcgtgggcatagtaaggcagttttattaactttaatcgatcgcaaatcacggttcctttgggcataccggttaaaagatcggacgacagcgactgttaatgaagcactaactaagttcctaaccacttttaatggtccggtgcacagctttactgtggaccgtggcactgagtttagtggactagtatcacttgaatcacaatatggtattaagacctattactgccatgcttatacgccagctgaacgtggtagtaatgaacgctttaatcggaatttacgttatttttatcctaaagggactcgttttgagcacattagtgctcaagatttaacgacgacgttactccaaattaaccagcgaccgcttaaaatactcgactggcaaacaccgtatcaggttatgctgacaaatttgtccgaaaattcggattaaatttgcaatctaccaattttatattatttcatccggcaacttgacaggaccctagtacatagcttgagtggtggttctttttttattttagacattagttcatttaattaggaattcagatagggaaatatactgaaatgaacgtaactgataaagtcggtcaagagtggcaatttatactaatttttgaaattacagataaagaagctaatcagggcaccgttgatttgaagaaagcaattaactgaggtgtcttactttaattgcctagcttgtttagttgacccacttgtctagaaatgttaaattgattctattcaataaaggcgttgattgttgggaggcgatgaaagtggatgaacgcattacagaataccgggatgcggtttatgagcaggtggtcaaagtcgggaagtcgttagggaacgtgacgcgtctacaactgttgaacattcttgcgcaaggccccaaaacggtggaagtcttagccagtacagtcggcttaagtgtcgctaccgtttcacggaacctgcaaattttgaaacaaacaaacttagtggcgattgaacgcgagaagaattttgttacttatcgtttaaattcagaacgggtcaaacaattggtaaccctcttggttgatgtctgcgaagaaactttgccagagatgacgattttggaaaaaacactcgcgcaagaaacaggtgcccccgaagcgttaactggtgacgcattgaaaacgaaattaatggcagacgatgtgtgtttgattgatttgcgtcccgcagatgagtttgcaagtcaacacttaccaggggcacgcaatgtgccatatgatcagttggatcaacgattagctgagctccccaaggataaagaagtggtggtttattgtcgtggtcgtctatgtgcttacgccaatgttgccagtcaacaactacaagctgctgggtttaaagtggcaacgtttaatcaatcagtgtgggaatggtcgcgagttatgaccgaaacggaataagatgaagcgtcctttttgacggcacgtcccaatggtggtatattatgagtaattcaatgaaatcgttgaatgattttcttgaaaagaaaggtgatcgcaatggcaacacaaattctaactgaagcaaactttaaagatgaagttcaagaaggggtcacattagtcgatttctgggcaacatggtgcccaccatgtcggatgcaaggcccaattgtcgaagaactagccgacgattacgcgggtaaagctaaaatcgccaaagttgacgttgatcacaaccaaaacttggcggctgaattcggcatccaatcaattccaaccttgttggtcatgaaagatggccaattagtgcaacaaatggttgggttacaacggaaagaaacattagcacaagaaatcaatactgccttagcttaaaaatagcttgaaggcgtatcacgattaaataataacatcatccgataagctcttaagtagggcatatattaggtgatgtttttttgtgttgttattttaagtaatccagcataacggctttaaagaagtcgatgtgtttgaggtacatttcttcatcaacatattcgtcaatcatgtggctagtatcattgccggggccgacaactgccacaggtaagtcaggattgtgcttagcaaggtgggcggcgtcggtaccgccagcaacgtgcatcagtggataagcttgggataacttttgtgccccgattttttgaacagcttgaatgaatggtgcttgtggattgctcttaacgggtggttggttattaatgacggtcaattccagattcatgtctacctgttgattgagttccgcaatgatggtattgaggtcagcaatcacttggtcgccagttaaggcgggggttgtacgaacccgacaagtaagttctgtgtgaccggggaccgaattaatttgttcaccaccgttgattaaggttgtgacaggcacgatatcgccgaggacatcatcaataggatgtttctgatcgaagtattgtttttgccgattgtagtaggcaagcaaatgatcaattgcgttaataccgagtgcgggcattgaactgtgcgcggttttaccagttgccgtcactttaaaatcaagggaaccgttatgggcgaaaattaagaaatgttgttcattggtttgattagccgcaaggagtttttgggccatttctgtggggaatttatcggggttatttgccaaggcttgtttatcaacgccagatggttcggcaactaataaggctgttaaatcatcggcatagccttgagcggttaaagtttgcgcaccagtttcgttcttttcttcatcgacggttgcgagtagtttgatttggccgtttagaggaacatgttcatcgtgtaattcgatcattgcaatcacaagcgcagccagaccagacttcatgtcgattgcgcctcgaccgaagagtttaccatcgcgagcggttagagtgaagggatcactcgtccatttgctgcgtcaccgatgctgacgacgtccatatgaccagtgacaccgaggactttgtcggttgcttcgcctagataggccactaagttttcgcggcctggtttagaagccactttttcagtatggataccatgttgtgcgaatagatcggctaagtagtcggcaatcacaccttctgcttggtctgttgtatcaattgagaccagtttttctaaaattgcgattttttcagttttttccatcatcaaaagacctccagataagattcaatatgcattatagagcccctattttgggaaagtaacggacataaattaagcaatttcgcaaatcaagtgggttaaaaaagccgtcaagcttagcgtggcggctttttattggtctggttggtgagggcttctttaaaagcctgaccggcgcggtttattcgttaaaccagtgcatatcaaacagaacgcatggattggtgccggcgcaacgattttaccgggggtgacggtcggtgagaatgcgattgtcgctgctaacgccacggtcaccaaagatgtaccagacaatatgattgttgccggaacgccagcgaaagtcatgcgtcaaatcaaattagaaaaggagttttaacatgtcaattcaaaataaagtcgtgatcattacaggtgcctcatcaaggattggggcagcaactgccaaattattagtaagcaaaggggctaaggttgttttagcagctcgtcgtgaagatcgtttacaagctttagcatcagaaatcggtgcaaatgcgatttatcaagcaacggatgtgactaatcgggatcaaatggcgagcttagtccaattggcgcttgatcatttcggtcgcgtagatgttttatacaacaatgccggcgtcatgccacaaggaaacctgagcgaacgcgattatgatcaatggcaaaagatgcttgatatcaacatcatgggcgttttaaacgggatcggtgcggtcttaccaacgatgcaagcccaacaagatggtttgattatttcaactgattcggttgccggacatgtggtttatccagcttctgccgtttataacgggactaaatatgcagtgcgcgctattatggaaggcttacgccaagaagaaaaagataacggcattcgttcaacaattgtttcaccaggggctgttaaaacagaattggtgaatacgattggcaaccctgctgttttcgaaggggttaagcaattaatggatgcaccagaagaatcagcgttggccctcaatccagaagacattgccaacgcagtcttatatgcgattgaccaaccaaaacatgtagtggtcagtgaagtcttaattcgcccaactaaacaacaagtttaagaaaagtggtcgactaagcgggtagtgcgtgcggattagcctaagcaggcgaataactgatgcagtcagtggtttgactgatgtagctaaacataaggcattgcttcgacgagcgcgtttcaaaatggtatttagtaactgagcataaaaaaatcaccttaatctgtttttaagattaatgaagtgaaccccaaatattggacgaaactttaagtagctttctgggttgtaaaaattcgatattcaatcggacttttacaacccagttttgttttaattcttgaaaaattataatcatcaatccaaaccgatatttgtgaaactagcgtttcataagtatcggtttctttttggtagaaagcttcggctttcataatatggaaaaagctctccattgctgcattatctaaacatgttgctttgcgagacatactttgaaaaatgcgatgttctttcaagatatgagtccaatcttgatgctggtattgaaatccttgatctgagtggactgttgtccggtattttaaattcttagggattttcttaactgctcgattcaaaacagttgtagtaaattcaacagtagggtgtttactaacttgatggctgagaatttcacctgagaataaatcataaatacatgtgaaataggcgcgttcatcaattgtcttggttccccagcgaacttcagtaacgtctgttactagtttttgataaggacgatcagtgaagaaacgacggttgattaagttcttagcaacggtgccaacattgcctctatatgaattatatttacgagtacgtttgttaaatgcagttgatagtaattgcagttctcgcattaagacaagtactttttatgatttactaagatattcatacgatgtaattcaccagttacacgacgataaccgtacgctggatgattcttcttgattatttggatggtttgtttaacagattggtcagatgaaccgttcggttcatgactaataatgtattcatacgtacttttggccataccaactatttttagaatttttactagtttgtgtttaagccttagctcttggatgacttgcgcttgttgttttcttcttcctggactaaggctcttaatttttttaggtattcattctcgatttgtagcaattcattttcttctctaagacgttctaactctgtttgttgccgtttttttgattgtttatcagctgacataattgtttgccgtcctttggaacgatataaggcatcagcaccctcagtctcccaaatatgttgccattgccagatggtcccgacgtttgagatattaaaatgaagtgcggttttcggataagaagccttattcgttttcatccattttaaaacattcatcttaaatgagccatcaaatgtttttttgggtgataggacatccagtctttttgggccaaaggccttataacgttgaacccacgagacaactagtgagttactcttaataccatattttctcgctattaatttataacctaagggtgacgttagataatcctgaacaacttttatttttaatgttttagaatatttggtcaatataaaaacccccgatattggattttggtccaatatcgggggttcacttcataaggtgatttttttaattaagtgcaaccaagctgataatcaaaatatgaaatggatgacaacagcttttttaggctaaaagtcgtataatgacagtattctaaatgaaattggagatcataatatggcagaattgatgcgtttttatcaaagctttcaaccggaacattatcaagtttttctagatattaatcgggctcaaaaacaatttagtggtcggacgacaattacggggactgctaaagaagcacttgttttaattcatcagaacggtttagtgattgaaacagtgacggctgcaggtaagagtgtgccgtttacagttgataatgacgcaaatgccttgaaagtcgaagtcggccaacctggcgaagtgactttggtaattgcctatactgccgctttaacggattcaatgatgggcatctatccttcttattatcaagtcgatggggtgcaaaaagaattaatcggcacgcaatttgaaaccaattttgcgcggcaagctttcccatgtattgatgaaccagaagccaaagcgacttttgatttagcggttaaattcgatgagcacgaaggcgaaacgattctgagcaacatgcctgaaaaagaagtcatcgatggcgttcaccactttgaaacaacggtccggatgtcaacgtaccttgtggcctttgcttttggtgaattgcaaggggttcaaactaaaacggagagcggcgtgcaagttggcgtctttgctactaaggcacatcaagcaaacgaactcgattttgcattggacattgctaaacggtcaatcgaattctttgaagacttctaccaaacaccctatccattaccccattcatggcagttggcattgccagacttttcggccggcgcgatggaaaactggggcttagtcacttatcgggaagcttatttattactcgatcctgataatactgccttggatacgaaacaccgcgttgcgactgtgattgcgcatgaattagcacaccaatggtttggtgatttagtaacgatgcaatggtgggacgatctttggttgaacgaaagttttgccaatatgatggaatacgtcgcaatcgatgcgttgcagccggactggcatatttgggaaagtttccaaacctcggaagcagcggcagccttacaacgtgacgcgactgatggggtccaatcggtgcatgtgcaagtcaataatccagccgaaatcgatgcgttatttgatggcgcaatcgtgtatgccaaaggcgcccggatgctcgtgatggttcgcgctttaatcggtgacgatgctctacgcgctggtttgaaagcttattttgcagcacatcaattcggaaatgcgactggcgctgacttgtgggcagcactggggaaagccgctaacttagatgttggggccattatgcgttcatggctcgaacaaccaggttatccagtggtaacggccaaagtcgttgacggacaattaacgcttaaccaacaacaattctttatcggtgagggtcaagaagttgggcgtcaatggcagattccattgaagagcaactatgcggcagccccattattgatgattgaccgtgaattggtactcggtgattatgctcaattacgcgccgacaatgggcaaccattccgcttaaacgtggggaacgaatcgcatttcattgttcattacgatcaaacattattagatgatattttaaatagtagtgctgacatggcaccaattggacaactgcaactactgcaagacttacgcttattagctgaaggacgtcaaatttcgtacgcagatgttgtgcctgttttagcaccttttgccaagagtgattcaaatgtcgtggcagatgccctttacacggttgctggcaacttgaagaagttcgttacaccaggagaagaaagtgaacaacacctgcgtcgattctttgaccaattgagtaaagcgcaagttgcgcgcttaggttggatggttcaaccgactgatagcaatgacgatcagttaatgcgcccaactgttttaagcgcagccttatacgctaaaaaccaagcagccattgatgcagcccatactttattccaagcgaaccaagaaaaattgatcaccttaccagccgcaattcgggtactggtcttgatgaatgaggtccaaaacttcgggaatgccgcgctttatgaccagctcttagcagcttatcgccaaacgagtgatgcgagctataagaatgatttgactgcggccttaacgcgcacgactgatcctgaattaattgcgaccttaattggaaaatttgaagatgccagcaccatcaaaccacaagatttgcgggcttggttccgcggcttactcgccaacgacaagagccaacaagcaacctgggattggattcgcaacgattggcaatggctagaagagacagtcggcggtgatatggaatttacaacgtatatcacctcgattgccgcaatctttaagaccccagaacggttggcagagttcaaagccttctttgaacctaagctcaacaccccaggcttaacccgggaaattacgatggacattaaagtcatcgaaagtcgggttgcattgattgaagatcaaaaagcagcggttaatgaaacaattgccaaacatatgtagtcgaacgttgtgcaagttaaattcaatttgaggggttttgagatgacgattaaattagtcgcgattgatattgatgatacattattgagttcacagcaccaactgctagccagtacgaaacaacaagttgctaaggccctggaacagggtgtgaaagtcgttttgtgttccggacgcccattagctggcgtggtgccctttttaaatcaactagggattgccggtgataatcaatacgtgattacgtttaacggcagtattatcgaaacggcgtctggtaaaatcttgaaagaagctggcatcagccgagaaacctaccaagcgattgacgactactcgcaagcaacgggcttaccgtataatgtgctcgatcaaaatagtgtggtttatacgagtaatgtgaatgttgcaccaatgacggtggtgcaagcttgggaaaacgaagctggtattcatattcgcaaaccgaatgaaatcgacgcggccacgcagatggtcaaagcggtctttacaggggccagcgaacagttagatgcacatgaaccacaggtacgcgcgcaatttggaactgataattatgttgttcgtgcggctgacctctttttagaagtgatgcacgctgatgttaataaaggcaaagcagtgcaatacctcgcgaataaacttggattcgcgccggatgaaatcatggcgattggcgatgagaaaaatgacatcccaatgttccaatttgccggtactgcggtgacaatgggcaacggttcagctgaagcataagcatggcagtaataggtcttaataccatattgtgattcaagtgatactagtccactaaactcagtgccacggtccacagtaaagctgtgcaccggaccattaaaagtggttaggaacttagttagtgcttcattaacagtcgctgtcgtccgatcttttaaccggtatgcccaaaggaaccgtgatttgcgatcgattaaagttaataaaactgccttactatgcccacgaggaccaacgactgtatctagttcaaaatcgccgatgcgcttacgttgattaatcatcatgggacgctgttcaattgatcgccccaaagattgattatatttggatcgttggtcaacgttacgccgttggcgtacgccatgttcaggtagatcattcaaggagaaaccaattctcccctgatttagccaattataaatagatttagtagctagtttaaattcgtgagcaatcattcctggtgaccagcttagacgtaaatggttgagaattttttgctttaactcatcgctcagcttagttttccgaccacatcgtgatcgcttgtattcggcatctgtttgtgctaattcagcctgataaggttgacatcgagataattcataagaaattgttgacggtgatcggttcagccgaacgcccatttggatattggacagccctagttcacaaaaggtttcgattttaattcgttcggaataggttatactagacaaaagatcagctcctaaaagatgggtttgtggtaaacaccattttaaaggaagctgatcttttttgtccgaacagcgttcggattaattttacaatctaccaattaaagaaaaaaagcgcggtagatttgtaaaaatctaccgcgcttttttggattaagcaaacattttcttagttgcgcgcatcaatgtcttgatgtcacgatcataacgtggtgtatcgactaacttggccattggaatgccagcgaagtgataagctgcaatttcgccagaacgaacagcactttgttcagtgaaaatcatctgataaggttgttcaacgaattcaccagtgaaggctaagttggttgaatgttcggggatgacttctggacgctcagttttggcacgattattaaagagtgctgaagcatatggcatatagacaggaatgttattgatgacactgtccataatttcagcttctttttcacgaatattgattgggccaggatcaacttttgatagttggccaattaattcttgaagcatttccttacccgtcatttcgatgtaaggtttatccacaaattcaccgttacgacgtgggtagaggaagtaaccccagataaccgcttcgtttggtttttgcgttgtgaagtgtggttgatggtgaacaacaatcgacatattcacatctttttgaccaagtggtgtgattggtttcgttgataggaacgaattcaaagcattcccaggaatttgcgttgtaatccgttcgatttcgtttaacaaaatatgattcttagtcgttaaagtgaagctgacccactcactggcattgcggtcagcgaagaatttatcgggattgccaagattatagaatttagaagcgacttgtttccacagaccggcagcagcaccataatccatgttttcagctgctggtgtattataatcgccaagtgttgcggaatcggtaattgacccgtttgtgaagatgaccgctgtgtcgtcgtccaccgtaacgtgttcaacttcatctgtctcagtattagtcattgtcataccagtaaccgtaatttcatcggtcatctgagtctctttaaagtctaagtcagtaatccgtcgattgaggataatgtgacaaccttgcgcttttaagtagttaatcagcggcagcatgatactttcgtactgattgtaacgtgtccggttaacaccgactaagtgttcaatctgagtgaattcataaatcatttggtgcatgtaacggcgtaattcttgtgcggaactttgggttctgaaagcaaaggtggtttcccacatgtaccagaagtttgtttggaacatatgtggatcgtccttgaagtattcggcaattgaaacgttgtctaatttttcttcttcagaatcgggcatcataatcaatttggtcattaataaccgatccttattattaaagccgagatgaccagcatccaaaatacctttactaccttctaataaacgtgctttgtcgaatgtgcggtgttgagcatcgaatgaacgggtatcttcttcagccgtcatattgggttcagttgctgaaggaatccgacctagaagatccattaaatcgacataagtccgatagttaagcatccgcccaccacgtgcaacgtagcccttagtattttcgagaggatggtttttattccaatattcatcggttgtttcggaaactgatgccccatcgtttgaaccatggtcatctaatgaatagaatgtaatcgcatcgccagaccaaccgccttcttgaattaaatagactgctgcggccatgttagaaaggccagcgccaatcataattgcttttttcttaatcatatgaaaaacctcctagattcagtttagaaatgacgagtgactaacggctttcgaatttttcgtaatccacagaatcgtctctaaaaagttccattttcttagctaataaacaagcaccggttgctgtaacacctacaaaaataaggctgcctaatagaaattttttcatgtttctcgcttccttccattaactacttttgatatctatattataccgcgaattcctaaaataggaagataaaacccttacataggaattatcagtggttatgatacgattattgatgggattaggccgctaaaaatcagaatagttaagtttagtttaaggctcttattagtcaggcataattcctagggaagcactaacggatttaaaaaaagtgataggcccccaaataatggttgacctcaagtcagcttgaggttgtaaagtagtcttattgattagaaaaaggagacttttaaatgcaaaaattatctgccttaacagccccaatgaccttaagcaacggtgttaccattccaggattagggtatgggacatatcaaacaccaaatgaagaaacgaaaaaagcggtcttagaagctttatcagttggctatcggcatattgatacagctgccgtttacggcaacgaacaaggtgttggtgccgctttgaaagaaagtgatatcgcgcgtgaagacatctttgtgacaagtaagctatggaatacagaacggggctatgatgctacgaaagctgcctttgcacaaacaattgcaacgttaggtgttgactatttagatttatatttaattcattggccagctaacactaaacaatttgaagccaaagatgctgaattaaatgctgaaacttggcgtgcaatggaagatctatataacgaagggaagatccgtgcaattggtgtgtcgaactttatgccccatcatttagatgcactcatgaaaaccgccgttatcaaaccaatggttgatcaaatcgaagtccatccgggctggccacaagcagaagctgtgcgttataatcaagcgcatgacatcttagtcgaagcttgggcaccacttggtgaagccagtgcgctttcgaatgaaacgattgcaacaattgcgacgaggcacggcaaaacggcagcgcaagtttgccttcgttggggggattcaacaaggtgtgttaccattacctaaatcaactcatcaagaacgaatggcgcaaaataccgatatcttcgattttgaattaacagatagtgaaatgacccaaattagtgctttggaaaacttaggcggtcaatgcatggtgccagatgacgttgatttttaagcaagtataaggaaggttaatatggcattatcaattggcgtagtcgcccaacaatatgatttgagtattccgacactacggtattatgaagaacaaggattattaccgtttattaaacgcagtccggctggtcggcgtgaattccggcaagctgatttagactgtttatgtgatattgaatgtttgaaaaaaaagggtatgcagttaaaagatattaagcaatacatcgattggcgaactgcaggtgatgaaactttggaccaacgcttggcgttgattcaacaacggcggcaaatgttggctaacgagattgaatcactgcaagtagaattgacgaagctagatcataaagaatggtattacacaaaggcacttgaagccggaacagaatccatttttacagctgactgtgatacagaatatgaacgtgcgcatcaataatcgaaaaaagaggcaacctgataggttgcctctttttgtgtgtttaaacggttaatgttttttgcataatcagatcacgttgtgcgtcgcttccgagttggaagatgtgatcaccaacttggctgaagccgaggtttttgtaaaagttaagtgcagcagtgttgtgttcccacacgccgagccatacgttagttttatggaattgttgcgccacggctagtgcatggttaattagttgtgttcccaaaccaagtcgcttaaaggactgtcgaatatagatacgttcaatctccagtgaatccggggcagctttttcagtttgtgcgccatcaatgttgagctttaaataaccagcgacttcgccatcttgataaataaaatagaagaacgaatcgggattctcgagctcgctagttaatcggtctgtattataagcttcttctaagtagttagcgagatcttctgctgcattttcagcgccaaaagttgctgtgaaagtttcacggctgatggattgtaagtcaggtagttggtttaatgtgacagcttgaattggcattgtgatgcctcctttgttgtaatagtgtcggacgtgtccctttttgacaaaatcccagtttgcggcaacgttggcactaactttgtttaggagtgcttcaagattatgggcctcgtcggtcgtcagtccagtcagtgccatttgatttgaataatcgttttcagctttgatggcgggatagacggctcgaccggcctcggtgagatagagatgtttgatcttatgattggttttgtcagggtgtcgttcaactaaaccatgcttaattaattgttgaacggcgcgcgtgactgttgcgcggtcgacttttaataattcacctagacgttcttgaatgatcccaggctgttctgcaatgcggactaagtaaaggtattgcccgcgggttaagtcatattgttggaattcaatattagcaatggattccaacgcgcgggctataaccccgattgggcggagaatttcagtcatgatggcatacctcatttcgataaaaatagtataaaatatttttgttgcatttacaacaaaaaataaagtttcgattcgttaagtacgccaaaaataagaatataattaattctcgatgtggaatatgcgctttcattttaaaatggcagattgtaaaatttaagttgaacatttaagtggacagaaaaacccatcaaggtctttaatggtgttaccacacaatccattagaaagaaggaccttgatgagcaccactattttatcattccagaaccgtgttgtcattgaaacgcttcataatgaaggacgttccttgcgatacatcgctaactacttaggctttagtaagaccaccatctttaacgaacttcaccggctaaatagtgagtaccaggctgggctagcgcaaactgactttgaacgaaaggttagtcaacgggggcggaagtcttcgctcactaaaaaccttaaacacttgatcgaggaaaagattcaagtccagaagtggtcccctgaacaagttgcccatgtggtggggattgcctacaagacggtctataactggattgatcaaggatggcttgatatacagttgcccgatttgcctgatcatggaattcgtcgtcatcgtgctaaagaaaagcgtggtacgttcaatcacggccgctccattgaggagcggcctcataaagtcgaaactcgccaggaattcggccactttgaagctgataccgtactttctggtaaacgtaaaggtcaagctgtggctacttttgtggagcgtaagagtcgcctgacaattgttaaacggctccatggtcgcgacagtcagtccatgactcaagccgtacttgaactagctagtcaacttcaagacaagctcaagacgcttaccgtagatcatggtaaagagttcgctaactatcagacaattgaacggcgaactggtacacaggtttattttgcccatgcctattcaccgcatgaaagaggcagtaatgagaaccgtaaccgagttttgcggcgctttattcccaaaggccaagccattgaagaactaagtgatcaccaattggttcaaattaattggtatttgaattcacggccacttaaatgtcttaattggcatacaccaatcgagatcttcttgcttaatttacgtcattaaattcgttcaagttatttcttgcaatctgccaaattgataaaatttcaaataaatatatttaataatgtgaacctgatgtgttattgtattggttgcagagcaattgattgtccgtgatgaagttggcgtctattaaaatcgaacaacaataaggactgggtgaagactacatggctttttcagattacataacaaggatactcatctacacaattgtgtcgtatccaatcgtcgggggattatctttcattgtttccagtctttattactggttatttttagaacgcaaagatatgccacgttacttagaaaaagggacgccattcattactattttagtgcctgcgcataatgaagaagcttcgattgaatcgacaattgaacaccttgaagagtgaatgaattatccaaccaatcagtatgaagtgattgtggtcaacgatggttcaaccgatcaaacaggtgctattttgaatcgattgcagactcggtatggtgagaagcgcttacgtgtgattacgatcattaataatcgtgggaaagccgctgggtttaatattgcactcggattttcaaaaggccaatttttattatcgaatgatgccgattctaaaccggaagtggatgcattgtggaaatacatgcactatttcgaacgagaaggtggcgatcgattaggggccattactggcaatatgttattaatcaacaaaacatcgttggtagctgaagcacaacaaaatgaattgaactcgatcatcggactgattaaacgttcgcagctttcatacggtggtctatttgcattttctggtgctaataccatgtatcgtaaggcggcggtcttagatgttgggggttggcaagcggaacaaccaactgaggatatcgctatttcttgggatatgcaggtgcatggttggcaagcgtatttcgcaccacatattcgcttttttatggatgtgcctgaaacactgcctgagttggtcaaacaacggagacggtggactgccggtgggattcatgtgttgttaacgaaatcgatggatgtctttagacacccgattaaacatttggcaatggtacccattattgttgattacagtttaagtgttatttggtcgctatttttctggttaagtatgattgcgtttgttggtgttcaggtgttgtgcttggtccaaggggattggtcacgtctaattaccaatttctgctttgcagcgatttttatttcaattgagattgtggtgggcttaattcagttgattatggcgtcttactttaatgaccgtggacgatcattaaagtatattgcgtttgcgccatggtatatcctaatctattggatggtgaatactttcaccgtggcggttgaaatcggaccaacgattattcagattcttaaaggcgaggatgctggcgtttggaagtcaccaaaacgttcggtagaggtcgtcgctaagacaaaagaggagggcaatcaagatgactaaaccagactatatcacgcatcaagtgagtgaggcatcgttgacgaatgattggttttttactaagaaaaagacgggcaaaaaaatctggcaggggattctgattgccattggatggttaatgtgtctggtaccgatgaccattacgggggtcttatatactgtcaaaagtgttccgctaccagttgacttaatggcctttagaaggatattattacagactaattattactttttattatacgttgccgtatttgcagtcttctttttagggctttttctattgaataaattacgaaaatatcgtttgaaaaaaggtttgctgcggatgtatgatccgacgcgattgagacagcgcatcgatctagcagaggatatgtacttacaaaagtatggtccattagacatgcggcacgaacaaccacagattatcattccagattacacggatgtgggcacctatgaagtacggcaaagatttgattattttgaggaggaagaagatgctttctaaaaaagatcaagcaattgtcgatgacatgattgttcgtgagcgaaatatgaaaaaccgccaacgcgtgattggggttattatgcataagcgacggttgtttaagcaacgtttagtgatgtacgctgctattttaacaacggctggtttttgggtgttatacacttcttttgcacgatacggtaatttatccgtcatcaatattattcaagtgaatgttttgatgaccgtgattttactattcttcaatttttatatttggcagaaattggtgcgctataatccaatgcaattgtttatcaaacggtagattgtaaaattaatccgaacgctgttcggacaaaaaagatcagcttcctttaaaatggtgtttaccacaaacccatcttttaggagctgatcttttgtctagtataacctattctgaacgaattaaaatcgaaaccttttgtgaactagggctgtccaatatccaaatgggcgttcggctgaaccgatcaccgtcaacaatttcttatgaattatctcgatgtcaaccttatcaggctgaattagcacaaacagatgccgaatacaagcgatcacgatgtggtcggaaaactaagctgagcgatgagttaaagcaaaaaattctcaaccatttacgtctaagctggtcaccaggaatgattgctcacgaatttaaactagctactaaatctatttataattggctaaatcaggggagaattggtttctccttgaatgatctacctgaacatggcgtacgccaacggcgtaacgttgaccaacgatccaaatataatcaatctttggggcgatcaattgaacagcgtcccatgatgattaatcaacgtaagcgcatcggcgattttgaactagatacagtcgttggtcctcgtgggcatagtaaggcagttttattaactttaatcgatcgcaaatcacggttcctttgggcataccggttaaaagatcggacgacagcgactgttaatgaagcactaactaagttcctaaccacttttaatggtccggtgcacagctttactgtggaccgtggcactgagtttagtggactagtatcacttgaatcacaatatggtattaagacctattactgccatgcttatacgccagctgaacgtggtagtaacgaacgctttaatcggaatttacgttatttttatcctaaagggactcgttttgagcacattagtgctcaagatttaacgacgacgttactccaaattaaccagcgaccgcttaaaatactcgactggcaaacaccgtatcaggttatgctgacaaatttgtccgaaaattcggattaaatttgcaatctaccacaaaaccacagtttacatcgatcgatgaagtaatcgcgtatattgataaacaaaacgctaatccgcatattcatcaaaatgatttgcgcaaatttcagaagttcgttaatcaaacaaatgaaatgatgctcagtacttcggatgaaaatgggcaaccttcaagccgccaaatgcggtttatcgtgttggatgatgcaccgaatatttggtattttgggacagcaccggatacccctaagattgaagaactcgatcgtggtttagcggcaattcacacaatgccaactagcgaaggaatgacgattgctagcagccggttgcgtgtttatcgcgcgcagtacaagttagatgaattagctgattattacaacgcccaagtccctgggtttatggatagtttatcagcagaagatcgtgaacgggaaattatctacgcaattgaactgaaaagtgcgcgcttggatagttggacgcagcatgaagaagtgacttttataaatgactaataaaaagatgacgctgaatgaattcggcgtcatctttttaaatatgataaggaaataataaggaagggttctctgaaatcggcttctaaagtcgtaaaaggcgcttacaaagcctatattttatgatttgttaagtaagcataatgtttatgtaatgttaatgtaacattcgccctatatacttagtctcagagttcgggcttaactaataggagaaaataaaccatgtcatttaaaaaaacgattacgactacaattgctcttggattattaacagcttcagttctttcaacaaacgtagtatctgctgcaacttcaagtgaagcacaagaagcgattactgctaataagaacgcaacaaacgatttgctcaaacaaatcgaatcagctaatatagaagtgattgggttggatcaaaagatttcaacaaacgcttcaaaaattgctgatcaagaagcagcaattactaaagcaaataatcaaatcgaatctctttcaggtcaaattacggatgctcaaaaagaagtttctaaacgaacagtcgtattgaagaaacaattagtgaccttacaagaaaagagtggggatgctgtcagcgggaacgtatatgttgacttccttttaaactcaaatgacctttcagatttagtttcgcgttcattcacaattaataaattaaaccaagcaagtaaagaagctttagatgatgttaacagcgctaaggcaaaattaagcggcttgaagacagaacaagaaaatactaaagcaagtttagttgctactaagactgatttagaaaaacaaaaagcaaacttagaatcattgaagagtgaagctgatcaaaaacaaacagctttatcacaaaaaatcaatgataacaaagacgaattaacagctttacaagcagacttcgacaaagcaagtactgaagaagcagacgctgctgctaaaaaggctgcagacgatgccaacaatgccaacaatgccaacaatgctaaaaaagacacacctcaacctacatcaattgacacgccatcagataataagggtggcacatctgttttcggtggcagtggaaaagttgctggtaattcagctgggaattcatatgcatggggtcaatgtacatggtatgttaagtcagtagcaccttgggctggcaataactgggggaatggcgctcaatggggtgcttcagccgcagcagctggcttcacagttaaccatataccagcagcaggcgcaatcgttagctttgctggtggccaaatggtaggttcttgggccgcagatgggacatatggtcacgttgcttacgttcaatcatacgatgccgcagctgggacaattaccatcactcaaggtgggatgggcttcagcaaccctgctggtcctaacacccaaacaatttcaaatgccggggcatttacttatatccataactagacattaatgattgaaggcccgcatcctagatgcgggcctttttttatgaaataaaatcaattttataaacaaaatataaatcaaatctagaaggtcatctgagtaactctagtcataaaaaggtatttattgatgtggattttggtaaattgtaaatgaatcactgccgaaaatcttgattgtcgtagaagtttttaaaaaatatttactttttatgaaattaagactataatgacttgcacaaaagataatagcgcgatgaactagataataataattataatattgcttaattataagctaatttattattagtaaatgttggttttacaaatgatggcaacagagtttagtaggagaatataaaatgactgaagataaagcaaagaaagatttaacagatttgttgattgggtcaatgcaatcaaaacgattcaatttaaactcaatcaaattggtgaagaatatggtgttagttttgacagccatttaatcttaaagttaatcgaagaaaagcaagcgattacgccaggacaactcgctaaggaaattggtggtggcgctcctaaaacgtcacgcaagatcaacactctttatcggaaaggtttgataaccaaagaatttgggacaccagatgatcagcgacgggtatcattggcggttaccgacaaagggagagaggtattagcacttgtcggtcaggcatatgaagattggtacgcaaaccatattgatgaaattctagagataaatggaaagttaaagtattagccatcacaaaaaaggcataaccacttagttggttatgctttttttgtgtgcatctaatagttttgttcgttcattcgttaaaggggtacattaaattcagagtttggtatactgagggaatcaacaagtatctaattttgttgcggataaggagtaagatgatgcatttggaaaaacgaacaacctttttattaactggctgcttgcttttgttatcagctgctttgtggcttattttcggtcctgctaagacggttactgaacaggcaatcacgcaatctagacaggtaatttatgcgcgatttacactccctcatctaaaacgggatttgggttactatcaagggttaacgccggcttcttttggacagtatgcaaaggcaacccaatctggaacttacttggtgccagatttagaccaggcgcagatgttgaaaaaaacgccggcaggttacaaagcatatacagcagaaatgatgacacctcaagggggagcagttacgccggactatgtgatcgtttcggcttatgaccatcaacggcaaggcaactcaattctgtccattatggataagcggactggccgacatttgaagaatattattttaaagggccgaccacacgttggtggaattacttatgatcctgaacatgatctcttatgggtttgtggccgtaagaaggcacgtgcacagctatttgcaattaagttaacaactattcgccagtaccctgcagatcagccgcaaaagccgattcaataccaatattcaacgttgttgaagtcgatcacccgggcttcacttgttagctatcacgatggggcattatgggtcggctatttcaatattttcggggatagtaacgtccagtcgtttcaggtttcagcggtcattaaaggacgcgaaaaagctggtgttaaattgacggcgcggaatatccgcagtaatgaacttaaaagtgaacaacgttggcaagcagtggataagattcaagggctaacttttagtgatacgcgggcttttttttcgcagtcctacgggttagacgattcatggatttacgtttttgcaacgactgggcggccccaacaatttacgccagaaaaggcgctacttaagattcggatgccagctcatttagagtagattacgttggatggcaatcggttatatgcggtttttgaatctggtgccaaagcctatgcattaaatgctaaaacgcggattggtcgggttgtatcgtttgatattgatactctggtaaaggaggcaaagcaaaatgatgatgcaaaagctcagtaagcgcacatggggattaatccttgcgagtttgatctttgtgttaacgcttttgaatacgaatcaaccactgttgcaattatttaacctagactttgcgcagttagccgcacaaccgtggtggttacgtcttctaagctttgcttattacttggtgttagtcattgcgctaggatggtggttgacgcgttttgatggtttatggctggcacaagaaggttcatttgggcttcctagttggcgcaatattcgtggggctatcggtgcaattgtactcctttgtggcattccaatcgttggagcccttttaatgtatcaggtactgcttaaatcacttgaagtcggtctaataaatgattacgcagccttgatttatcagaaccaggtctggccgacattagcatggttcttttgttgtcagatattattcattagtttgtacatgatggtgattattacgactggtcagcttgtgaatacaatcttacaaagtctacgggtatccggttggttcttgcgcttgttaacggcagtcgttgtcagttttttaatatttggcacgttatcgtggcttgcggttccaagtcaagaactgctcgattggggcagtttattggccttatatcattttcaaaagcaccgtaatttttggacaagtgtcgcgattgttctcattagtagcatgatttatctgatgatttcattattaccaattttaacgtaacaattcgggaggaacttatatgcgccgtttaacatcatttttaagggctaattatcggctctttagacaacattggagtgtttatttattactgctcgtcattacgaatttaattattggcagcttggtggcaccgctgtttacgtggcttgtagaacggttggtggcactcaatggcgtgacgtatttaacctacaccaatctggtgccggtgatgatgcgtcatccgcttttaatgattagcttactaatcattctggtcttgatttgcgcggcagtttatctgcaaatgacgttcttgttgcgcagtatgcgccatattcaaaagcaaacacaagaaacatactggatgatttttaaggaaacagtccggggattagtcgctttacggccaaccacgatgttggttggtttactgtatttcttattaatcttaccctttggacaggtcctctttaaatcagcgttgttatccaaggtgaccgttccagattttattattcaggatatgtggtcatcacccaaaatttgggtccccattatcttggtctacgcgagtgcattagtcctttcaattcgcttaatcacgtttttaccagaaacgattgcacatccaaaggcgcagctaagaaccacgctcaaacgctgttggcaagctacccaatatcaggcttggcgtatttttctaaaaggctttgtattaacaacgtcggtagcaattgttggagtgggcttccgcttaatcttgtttgctagtcaacggtattacgaccaacacttgccacatcaggctttatttttagccattttgaatctgtttatttcagaaatcgtcagtcagattttactcgcattaacggtggtactagtcttacagattgtattgaaccaatatggtgaagttcccgcaatggcgacggctgtgcgccaatctaaggtgaaaaaacggactaatttgacgattctccgccaaattggcacaatcggtttaattgttatcgtggctggtggggtagcattgtacaattatgtctatttagagggaatgttggacgatcaaccggccttgatttcgcatcgcggggtagatgatggtaatggtgtgcaaaatacgattccagcacttgaaaaaacggcgcaggaagagccagattatgttgaaatggatgtgcatgaaaccaaggatcaacaatttgtcgtgatgcatgacgataatttaaaacacttggcgggtgtcgatcgcggcgtccatgacatgacacttgctgaattaacggcattgactgtccgtgaaaatggtcattctgcaaaggttgctagttttgatcaatatctagcagcagccgaaaagcaccatcaaaaactactcgttgaaattaagacaacgaatgaagacagtccacagatggtgcaacactttatcgataaatacgaaaaacgacttttgaagaatcataaccggattcattcattaagttatccgattgtggcggaaattaaacaaaaagcaccccaactatttgttagttttattctgccgtataacattacattcccccaaacgccggctaatggctatacgatggaagtgacgacgctcgactcagattttgtgggtcaagcacacggcaaagggcagacagtatatgcttggacggtgaatgatgaggatgtgatgcaacgcatgttatttacaagcgttgacggcattattaccgatcaattatcgacgcttaaagaagtggtcaaggaaaataatgaccatcctagttatgcgacgcgtttatcaatttattcaagtcaattagccggtttcaatggtgacgtagaaaattaagccaaaaaggccttagcaaaatcagtttgctgaggcctttttttgataacgttttaaatgataactacttgtagacggcgagtggtttttccgatagagttaatacttatagtttagttgaggagtaggatgaattaatgcggaacaaaatgacaatgagcgacaaattattatatggcgggctactggcagctgcggggggctttgattcttacacttatttggtgcacggggaagtcttcgccggattacaaacggggaatctaattttattaggaacccatttggggcagatgaaatggtccgtattattacggcacattaccccgattctcgcctttatgttgggaacaatcttaacgcgcattttacaacatcggtttgaaaaagacgaatcgattaacaaacgacaacggattatcttggggattgaagtcttggtcttaacgattgttgcgggaatttcaccgtatgtaccggatattgttgcaagttcacttgtttcaatcattgcggctgcgcaattacaggaatttcgtgaattggatggtggcccatttacatcattgatgatgactggaaatgtacggacgatggcggaaagtttttatgacgctgtttttaaacatgatcgtaaggcagccgataagggctggcaaattttacgcatcattatcagttttacgattggtgcagtgatggtcggactatgtgtctcattcttaggagaacggacgttgattttatcagcattattcttgttgatgacgatgctgattttacaattaaatccagacaagaaagtttagcctagatatgttacgctgaaaggtaacttgccaaggaggttaatagatgttctttttaaaaggaatcttgatgggatttgcgtttgtcgcaccaatcgggatgcaaaatattttcgtttttaataatgccatgtcgaatacaacacggcgggcagttttcaacagtttgttcatctggttatttgatgcgctcttttcactcgtggcgttttatgggattggcgcactgattgtgcaaaacgatgcggttcggttagccattatgggaatcggtggacttttgattttatggattggatacaccattttaaaaagtgcccgcagtaccgttacgtttggcgcgttagaaccaatgccactggagaaggttattttgactgcatttgtggcggtttggggtaatccgcaagccttgattgatgggacattaatgctgggcgcattgcggggtggcatgacgagtagcgaggcgattccattcatcgtgggggttgtttcggcaaccgcgacctggttctttggtatcgccattatctttagccttttccggaaaaaagtttcaccaaaattcttgatgggcgtcaacttagtgagtgccatcatcatcatcgtgtatgggcttggtttattggtcaaagtggggacaacattgctctaggaagggatattgctttttaatttaccctgttgaatggtatccttaagtatcaaaacaaagcgaggtagaacaggatgcgcaaaacaacaatcattgttagtttagtaacgctcggcctattgacgggttgtacagccaaccaaacaaaacattcagcaccccccgctcaaaaagaatcgactagtccgcaacaaacggttcaagctccgaaagtgacgcttgaaaaagcccgtgaattgtacgcaaaacaatatcctgcatcagatttaaccgaggttgagctgaagcaatggggtaaccaaatgttttatgaattaacgggaatgaacgacaatgaagagcttcacatgcatgtggatgctcgaactggcgcaaccagtcgattgtcgaaagaagcccttgatgccgatgaacaaaatggcgtcgagcgacaccaaaagcaattagcgtttgaccaattgttgacgcctcaacaagctcttcaaaaagcgcaacaatacttcaccgggaacgtgatcaaatggtcattggaaaaagatgatggccgaacagtctgggaagtagaaggtcatcaaaaacagcaaaaaatgcaagttaaattagacgctgaaactggcgcgctaattgaaaaagaaatggatgattaaagcagtatgtaaagcgccgtcgagaataatttcgacggcgctttttttgtagcttgcgttaataaatttgttatcgatttgaataaaataaattagcattgcctaactttttatttacatttcattaaaacggcgtacaataaaactgttatcaagatcaaaataaggagtgaggataatgaatcaacaagaaaagggcaagaagcacaagctgattgaatatgcgaacggcccatcacttgaagaaattaatgggacggtcgaagtaccagagggcaaaggcttttggaagatgttactagcgtattcaggaccgggtgcattggtggcagtgggttatatggatccagggaattggtcaacatcgattactggtggtcagagttttcaatacctgttaatgtccgtgattttggtgtctagtttaatcgcgatgttattacaatatatggcggctaaactaggcattgtaactcagatggacttagcacaggcaattcgcgcacggacgagtaaaccgttgggcattgtcttgtggattttgacagaattagcgattatggcaaccgatattgccgaagttattggggcggcaattgctttgtacttattatttaagattccactgctgattgcagtattcattacgattttagatgtcatgctattattactcttaacgaaaattggttttcgtaagattgaagcaatcgttgtcgcattaattgtcgtgatttttgtggtttttgcttatgaagtagcactctcagatcctgattgggcaggggtgattgttgggctagtaccaactgctaagacctttgccaccgggccagctgttggtggactaaccccattgactggtgcgttagggattatcggggcaactgttatgccacataatctatatttacactctgcgatttcgcaaacacggaagattgatcgcaagaacgaagcacaggttgcacaaacagtgcgctttgccacttgggattcaaacattcaactcacgatggcatttttcgttaatgcgttgttattaatcatgggggttgcagtttttaaaatgggaacggttaaagatccatcattcttcgggttatttgaagctttgtcagatacctcaacaatgagtaacggaattcttgcaagtgttgcccggaccggaatcttatcaactttgtttgccgttgcattgctcgcttctgggcaaaattcaacgattaccgggacgttaactggccaagtcatcatggaagggttcattcacttgagaatgccattgtggttgcggcgtttggtaacccgcttgttatcggtgattccggtattaatctgcgtcatgatgaccagcaataaaccagccttggaagagcatgaggcgctcaataccttgatgaataattcccaagttttcttagcgtttgccttaccattttcaatgctgccactgttgatgtttaccgacagccgggttgagatgggggatcgcttcaagaatagttggttgattaaaagcttaggttggttatcggtcattggcttgacctatttgaatatgatggggttgccaggacaaatcgaagctttctatggtgatcacgcaagtgctgcacaattggctactgctgatcgcattgcatatgtgttgattgctggtgtgatggcattattggtttggatgattattgaattgtataaaggcaataagcggtttgaacagcaattagcaactgaaaattaattggaggttggtcacatgtcagttttagaaattaaacgaattttagtcggggtcgatgactcagaggatgcgttattagcgtttgattatgcaattgagcgggctaaacgtgaggatttagaattagtcattgtatcggtattggaaaatgacgaaatgaacgtctatcaagcattgaacaaggattttatccacggccaatatgaggatcttgaaaaccacctacgagaatatcaagatcaagcctatgtgcgcggtgtgaatcatgtgcgaacagtaattgcagaaggcgaaccaggcgaagcgattatcgaagatgtgattcctaaggttaaacccgatttgttaattgtcggttcgaaatcacaaaagggcgttgctaaatacttcggcagccaagccgcctacatggcaaaatacgcaccaatcccagtgctggtagtgagataaagagtgcgaaaatcgccggagatattctgaggattagcctaacaacggaagaatatggcgattgcagcacgtttaaaaaagcgtgtgttcggtcgcggatagcaactgagtattttagattaagcggaggttggtgcaaccaaaaagcacgtttcaaaaagatgtcgataatttattttgtcggcatcttttttatatgctaagctgagaaaataaaagtttaagcggaggatagactgtggataatgaagtcgcagctttttgggatgattttgcagcggaatactatcagattcaacaagagtcacaggtgtcgattgtcactgacgttgtggcttttttacaggatcggcgattactgcctgttgagacagtggctgacttaggtggtggtagcggccgttatttgccacctctagtgcaaaacagtcaggcttatacgattatcgacatctcggcgcaaatgctccagtatgcacaacaagaagctaaacagcatgtaccagaccaacagattgcttatcaacagcagtctgtggctgactttatggcgcaaacgccacaaaaaagctatgatttaatttggatggcgttaaatccggcaatcgaagccaatcaagcattactgacgattagcgaaaagagccgtcagtggtgtgcattcttacggctcactaaaaacgaggacgacttgttcacaccgcttgaacgttattttgggattgaacagcaagatcccaacactacaccggaaatcatcccagctgtggaaaacgtgttaaaagatgcgggctaccaagttagtcaacaaatttttcaatatcaaacaagtgaagttttcgacaggccatttttggaggcctattacgaagaattaccaacggaccaactggcagcttatctagatcaagtatttgcaactcaaaaaacacggaccagtacaacaacgcttgaatatacgttgctgtattggcacgtgttttaagagttaaattcccatcgccaccagtcctgtcggaatattttcaactggtactgggtagaatggcaggccggtttggatggccgcaatcatcatgtgattaagatccatgatttgatcggcgctgattgttgctgatggtgcaagtgcagttgggataatgagtgctgttagttggcgattgttaatgcgtgaaagaataatctcaggatcaccaaggtttgaatcgccgtgatacgcactagcggcccgttctgctaatccgagcgctttttgtcggagttcatgacgcgcatttgtgagtaacttgtcgagtaagtcgtcatctgaaagagaatcaggggaagtttggatggcttgatccatccggtagtttggattaacgacgagttccttgaagagatttaagttgccgggtaatgtgaccacgtaaatcggtgctttttcaggcagcaagtcatcaagatagcggccaatcacgcggaaatagttagtttgatcgataagttgttcattttcttttacaacaaaactgtgggttggacttgagaagccttggacgacttcgcctttacgctctgtgccaatcccaatttcaatggttgttggggcgtctttaggtaaaggataatcccgaatgacattttgttgaatggatttcaaactaaaagtagtcttgttgagacagagaatggtcccgttcagactcagacttaattccgaactgagtggacgcagctcgggttgatcagcaattagaaaatattcagtcgtgatcggataatgaaggggttggctgtagtgaccagcagctgtgatgtaaaacgcaactgactgtatatgtgctaattcttggggagcggtacttagtaagtcctcaagttggttgagtaaggttttttcttcaggatagtcggtggttaactgttcacggatttgcttagaaaaactattgagcttaatcttgttcgcattaatggcttgtccgccagtctctaagttaatgaataacgagatgactggctgatttgaatcggcgattaattgagttaaactttctggatataacatatcgacacctccgtttgattaacttcaccttatcatattgaacagctacctttgaagaaagatgcctttgtaaaaaataagccaacgagggacttttaatcaacttgatggaaacggtatgctaaaatggtaagtaggttaacaagggaggatttatggtatgggagataagacgaaagtggtaacacccacaaagattagcaaaagtattcggacccgtttttttgtactacaaatggttgtgattctaatccttggcgcgctcacaattaaacttgtgagcggctttagtccattattgacggattcagaaattctaaaaaatacaattttgacagcttttggggcaaccttagtcgcgcttgtagtgtggtacctatcgtataagattattgcaatgcgcattcggcgccaaatcatgaataaagagctagaggatagctacacttttagtttgaatcatgctgctagcagtcttagcttacatattgtgtactttatcagtatgttggtgattgtctggttgatgttgagtgctcaaaacgtgcgccagtcgctagatggcttacaccttttcaaaggtgatcaaccgattgtccggctggtcgataatcacagcatgaagcaaatcgagcaattctatcaagctgataagcaacaaaagatgacgtatcttggcagcaatcgagatgttgcttatttcaagattaataatgcaacgattagcttaccattagccaagattcaattctatggtcaagatgaagcgccgactggccatcagaaacaagtgattcaacattatcacttaaaagatgtgcaaaataagaaatacctcaaacctaatatttatattagtgaatcaggcttacctaaggtggccattacgaagatgtaccaacattatgagccacaaccagcggataagattcataaactcgacattaaataggataactaccacaggagggctggattaaacggctttcatttggtacagttagagatgaatatttttttaaataaaggagatcaagtcatgattgaagcagtaaacctcagagcaggaatgacgtttgaacaagacggcaagttaatcaaagttttagaagctaaccatcataaaccgggtaagggaaacacggttatgcgtgttaagttgcgtgacttacggactggctcaattgttgaaacaacaatgcgcccagaagttaaagttgaacaagcaatgattgatacaaaagatgttcaatacttatacacacaagataacgtggcattcttcatggatcttgaaacttacgaacaatatgaaattcaaacagctgctattgaagctgaattaaaatacttattagaaaacatgaactgcaagattcaattcttcggttcagaagtgatcggggttactttaccaactactgttaacttacgggtcgttgaaacacaaccttcgattaaaggcgcaacagtgactggttcaggtaaacctgcaacgatggaaactggtttagtcgttagtgtccctgatttcatcagcgctgacgaagtccttgaaatcaacacacaagaaggcacatacgttaaacgagcagcaaaataacaagcttaaggccgactagtcccatagtcggtacttcaaagtgaagccaagatggttttctttcgataaaagaaggaatcaccttggctttttatgtttgggtaaagggataaaaaaataacagagaagcaacttatgatggattgcttttctgttagttatcaaaaattatttgacgcaaatcgtggctttaacaaacaattctagtgaatataaacagttattacggtaacgagtccgaaaataacgccagggatgttagaaataataaccggccaatctttataggttttattccagccataggcggtccatagacacccattaattgttgcgactaagggctgtaaaggtgagacaggtgaccctgaaaaattagcgataatttgggggatgtatgaaacatacatcgtaatacaggtgattgttgcaaccttgctaagtaattttaaacgtttaactttcttagggtggacggcgttttcgccggtagggtattcgccagtatcaatgcgcataatagactccgtttcatgattgaattttattatatatggttgacttgaaaccgcttaaattctatagtgatagtatgcacgaagtgaaagagagtggaggttttacgaatggcaaagaaaataattcttgattgtgatccaggccatgatgatgctgttgcaatgatgttagcatacggcaatccagaaatcgatttgttggcagtgacaacggtggctgccaatcagacgttaacgaaagtgacgcgcaatgccctcgcagttgcgaccatgatcggcatgcacgatgtaccgattgctgctgggtgttcgcgaccattaattgaagaaattaaagtagcagctgatatccatggggagactggccttgacggggttgttcttccagaaccaacggtggcgcttgaaaaaagtcatgcagttgatttaatcattgatttaattatgacgcatccagctaatacaattacattagtgccaacaggtgcgttgaccaacatcgcaatggcggtacgcaaagaacctaagattgttgaacgcgttaaagaagtcgttctaatgggtggcggttatcacgaagcgaatgcgagtgcagtggccgaatttaacattaaatttgatccagaagcggccaagattgtattcaatgccggctgggatgtcacaatggttggtttggatttgacgcatcaagcgttagcgacaccagatattgttgaacaaattgaaggcattcatactgaaacgtctcagttcgtggttgatttgttagcctttttccgcgatatgtacaagaaggggcaaaatttcgatgtaccgcccgttcatgatccatgtgccgtggcttacgtgattgatccaagtgtgatgaccactaagaaagtgcccgttgatatcgaactcaatggaacattgacgcgtgggatgacggtcgccgattttagattcccaattccaacagactgtcacacatcagtcgctgtaaaactcgatcatcagaagttctggggattagtggaagacgcaattaagacgatcggctaaatagtcaaaatacttgagtagagaaggcgttgtacatgtatcacgcattagaaacccgttatcaagggatgcaatataaccgcgtcgggcattctgggttgaaattaccagcgatttcattagggttatggcataactttggtgaaaccgataagatggcgactcaaaaggaaacgatttttggcgcgttcgatatgggcatcactcatttcgatttggcgaataattaggggccaccagcgggcagcgccgaggaaaactttgggcgcattttacatgataatctgcgtcgctatcgcgatgaaatgatcatttcatcgaaggctggctattatatgtggcccggtccctatggtgagtggggttctaagaagaatattatcgctagctgtgatcagtcactaaaacgacttcagttagattacgtcgatattttctatcatcaccgaccagatccagatacgccaattgaagaaacagctcgggccctagatttattggtgcaacaaggaaaggcgctatatattgggatttcgaattattcggcagaacaaaccaaagcgattacgaaggttttcagagcgctcgggacaccctttattattcatcaaccacgttataacatgctcgatcgatggattgaagatggactaacggatgtcttggcggatgaaggtatcggtgcaattacgtttagtccgttggcacagggattattgaccaatcgttatttaaacgggattccagccgattcgcgggcagcttgtccagatagtcccttcctatcacctgaaaaggttgatcaaacaatcagtacggttcaagaattgaacaaaattgcgcaacaacgtgggcaatcattggctgaaatggcacttgcgtggaatttacaacagccgactgtagccagtgtgttagttggtgcttcgcgcttgagtcaattacaagacagtgtgcatgcactagataacttaacgtttacggccgaagaattagcggctattcaaaaaatattagcataattaaaacgacgactagctacgtaagctagtcgtcgtttttttttgtttttattcagctgtttcagttgcggctgcgtttgcttggattttaccaagaatggcgcgtgagaaaggtcccacgatgatcagttgtaatggtaatgcgacgatgacattcatcaaccatgtgtgacgatagacactacctaagtggtcagggataccaccttcgatgagaattccgaaaagtgacatacatgtgaccatgccgagaatcattaaacatgaaattgtgagaatcatgactaatttattttctttgttcaatggtaagctaaatgcgatttttttagcaattgcaccgacaacgaatacatctagaataaatgcgacgatgaaacctggaattaaaccggtagacaaagcaccccatgatagactatcatgtaaaactaagttatagatactcattccaagtaccatgcagaaacacattaatgttgtaaaaataataccttcttttttattggttggcattttaaattccttctttctgaaaagttaacagatataaccgtatcacataaaaaatttcggcgtaagcttttttttcagaaaatgagaagtttcttctttttcaatttcaatgggaatctcgccatcatgaacggcgtgaaaaatcgaaacgagcaataatgcgcagacaaaaatcaatgggaacccagcaatcacgcaaacggcttgaatggtttggaaactaccgacaagtacaattccaagtgaaaatagaatgaaaatgatcacccaagccatccgattccaacgattaggttgttctccgattttcaattcaagactggtaaatgatgagacgatgaaggccgaagaagagatcgttgtcgccaggaaaatgaaacatgacagacagaaaattgctaacatgataattttgaacggtaaggtcgtgatgaccgccgcgatgacagcggcttgtccttgggtattcaatagatgaacaagatcgatttgaccggaacgttgtaagaagagcgcataaccgccaagtacagcgtaaaagctcatacaactaaatgcgccgtatgtcgccattcccaataaaacttggcgaatggttcggccgcgtgaaatccgagcgatgaataagcccatgacaggcatgtaagataaccaccatccccagtaaaagagggtttcgtgttgtgcgaacgcactgtgtgcaccagtctgatttaaacttaaacgcccgaagttaccaaagagatggaagacatcgcggccttcagcgccaattagcttgaatgtcggaccgattagtaagacgagtaataaaaagccaatggcagtatagatatgccaagcactgagcttcttaatgcctttatctaagccggcatataccgtgagggtgaatagcaccagtaagataatgaagagggcaagtttaagccagatggtatcattcaaaccggtcattgtgctcaagacttttgaaatcacgggaatttccattccgattgatgagccgatgccccccataatgccgaaaacaacggtaaagtcgattaatttgcgaattatttttttgtaaggttgtggtccttctaataggtcgattgcggcgcttaaacgttgtacccgtaagttcttaacatagagagcgtagccaattgcgacagtcgcggtggcaaaaatcatccatgccatgggtccccagtgaaattgcccacagacgttggcgtagcggtatgcttcagccgagaaaggtttagcgccaaatggtgggttctgtaagtattgcagtggatcagtggtactaagcattaagatgctagcgtcaatcccagttgcaaaaaccatactcccccattggaagtcgttatattctggcttttcatttggttggccaaggcggatatggccatagtgactacaccccaaccaaaataggaaaataaaattaatgatataaataccaatgtaaagccatttagaatgtgccgtcatcacatcaagtagttgtgaaatcgactgctgaagcgtgtcaccccccaacattaaaaatgcggagacaatcccgaacagtaacatcgtggggatgaagacgactttatcaacattcttgcgctttaaaataatattcctcctgaatttgttaaagtctaggttgctggatcaaataaaaaaagcgcccatacaattggtcaactgaccacctgtacaagcgcgttattataacgtatacaaatgaagaaacagcctaacttgatttacttcttactaataggatagcacttatctcaaatttgttaagggtcgattttacggccgtgcggttgttaaccaattaagatagtcttgttcgcggttaatcgcgtgttctaaaataagataatgaccatagtgcgcatccaccgcagcttgttggctgaaaagggtttgacgccggtcgagtaggtgatctagtttggcttggtgtaagtttttttgttcggtgaacattgcgtctaaatgagcatcattttttgagtcgataaagtatagcttcaaaataaattcgtctttgctggcaataatttcgctggttggggagtatcgccactcgtcaaaaaaggcaatcccatctgcagtgattgaatactgcttcttttttaattttgttccggcgatcaattcgacgtgggtgatccgatcagcctgttcgagtcgcttgagttcaggatagatttggctgtgttgggcttgccagaactcaccgatatcatcttcaaagacgcgttttaaatcataaccggttttgggagactgatttaacagcccgagaattaagtattggagaatgtttttttgggccatctgaaagtgcccctttctgtgaaatcaacttagattaagtatagcacaggccagtgttgaaaaatggttactttttataagtctttttaattgcatttcataaatagttagcgtaggctatttcaatcggggaaaagtgcgttcaagcttaatcaacttttgagtattagtacggggaagcgaattagcgacgaagtcgatgatttgattcacggtgctaagcgcagaagtctgcgaattaaaagcacgttaaagaaaatgagtgcgtcaaaagtggttatcctgtgaggattagcctaattagccaaattagcggcgtaaccgattgtttggctaatgtagctaaccggaacaggatgcttttgaaagcacggtaaaaaggagttttatcaatggcaaaaaaatcaaaagtggcaaaattagcaaaacaacgcgcattagtagcgaaatacgctgacttgcgcgcagaattaaaagcaaagggcgattacttagctctttctcaattacccaaggattctagcccagtgcgattgcggaaccgcgatgtaatcgatggtcgaccaagaagtttcatgcggcaatttggtatgagccgcatcaactttcgcgaattagcccataaaggccaaatcccaggcgtcaaaaaagcaagctggtaaaaaaatgagtgcgttaattcgcggttagcctttgagcacttgcctaatcagaaggataagcgccaagggcgattgtctggttgatgtagcaaggcgcagaaggttgcgaattaaaagcacgttaaagaaatagaagcgcgtttgaaacgttttgacttcgagcactagcctaaatctgtaaatgagcgacgtagtcgattgtttacggattggagctaagcacagaagtcagtttcaaaaagcgcgttaaagctagaaacccacaaaagaagaggtcgtcccacggcctcttttcttgtggggattgaatacgaccttaccggtggtcttgaatttagcgttagtgggttacgaagatgtgatcggcacggccagcgggttgtttagttttggctactacctcgcaatcagcgccttaacgtacggcatgagtctattgcatacgggatcgaacactcgattaccgttatacatgatcatgattgtcggcgtgatggctctgagttatggattcgggattcgttcaaaagcagtttaaatgtaaaaagcgcgcagacaatcagttgtctgcgcgctttttatttaagcaagttgttgttgcaaaccagcgaggaaaatatcgaggcctagcatgaatttttccagtgagcgttgttgttggtgccgatgatgttcaaaagtttttaagaaagcattgtaatgattgtcagtcgcaatctgctgcattttaagcggtaactgtgcaagataagtgtctttatgttgtgagacgcgatgtttcatctcaagctcaccggtgatgtcagtgaagagaccggacatgaagtgatcgatggattcaatcgctaggcttgcttgttctggcgtgaaaccggcatccaaaaggatttgaattaagtggttgataagacctaggcgggccttagttgcagggacggtccgcatcatcaactcagcggcatagggctgtgctatgtaagtggtgtaaatggcgctaaaaatttggcgaatttggtctgtccattctaaggttgtgttacatggctcaatctcaatttgttgaataatgttatcagccatcgcctgtaggagggcttgtttgttttcgaaatgccagtaaaatgtggccgccccgatgtctaattgattggcaattttacgaattgaaagggcatcgacggtcccggatacttgtaaaatttcaaacgcggcagtgatgatttgctcggcagagattgactgttttaccatattaatgaagctccttcactttttatgaaaagatgattgtaattcgttttaaaatttgataaagtagtaactcgaacactgttcgattatactgtacaggatttgtacaggagattcaactacagaaaaagagggatgctcatgtcgatacttaaacagcacttaaagccttattggggcgtgtttagtctttccattttagcgacggttatttctgttgcgtcttcactatggcaaccaaaactattacaagatgttttggaagggattatgaaaggcgatcaagataaggtacgtcaaattggaatttatttgattgtaattgccgtggttggtttaattgcgggcgtggtcaacaccattacgtcggcgatgacggcgcagggaatgactgccgatatgcgggaaactactttccggaagatacagactttctcatttgccaatattgaaaaattctcagttgggaatttatccgtgcgtttgaccaatgatatgacccaggttcaaaacgtcattatgatgacgctccaaacgatttttagaatcccgattttatttgtcggcagtttcatccttgcgatgaattcgattccgagtttatggtggattatcgtgctcttagtgatcgcggtcttcatcattacattcttatcaatgggttcgatggggaaacacttcggtgccatccaaaatttaatcgataagattaataacctcgctaaagaaaatttaatgggcacgcggattgtgaagtcttttgtccaagaagataacgaaatcagtcgcttctcaaaaacaagcaatcaattagaacaccatacgacaatcgtcgggatgcttttttctgtaatgattccagcgttcatgttggtggcgaacttagcggttgtcgcatcaatctatttcgttgggaacttagtcgatacggatccagaagcgattgtggcgattgcctcatttatgaattacttaatgcaaatcatgatgtcgatcatcatgggcggcatgatgatgatgatggcatctcgtggggcagtttcgttgaagcgactccaagaaattctttcaacagagcctgatatcgtttatccagatgtccctgatcaagacttagcggggacgttggaattcgatcacgtcagcttccgttatccagaagacgatcgtaacacgttaacagatattaatttcaaaattaacgctggtgaaatgattgggattgtcggcgcaactggggccggtaagtcaacgatggcgcaattgattccgcgcttgttcgatccgactgaagggcagattaaaattggcggcgtgccaatcaaagatttaaacgaacataatttacacagcgccgtttcatttgtcctccaaaaagcgattttattctccggcacaatcgcacaaaacttgaagcacgggaaaaaagatgcggatgacgccgatatggaccgcgcaacggggattgcccaagccaaagagttcatcgaaaagcttgctgatcaatatgatgcaaccgtcgaagaacgcagtgcgaacttctctggtggtcaaaaacaacggctctcaatttcacggggggtaatcgggcaaccgaagattctgattttggatgatagtactagtgccttagatgcccggtctgaaaaattagttaaagaggcgttagaccgtgaattagctggcacaacaacactaattatcgcgcaaaagatttcatctgtggtcaacgcggatcggattttagtgttagatgaaggtcgtttagtcggtgttggtaaccatcatgaattacttgaaaccagtgatgtctaccgagaaatctttgaaacgcaaaaaggaaagcgaggataaccaatgcgagaatttaaccgagcaatgaagttctttttccattatctaaagcggtataaaccttcttttgcaatcatcctcgtgatgactgtgatggcgacttatcttcaggtgaaagcacccgaatatatcggggacgcgctcaatgagttagtcaaatatgcaacgaaatttcaaattttaaaagcccaacatttgccaaccagtggggcatctaaagacgccttcgtagaggtgattgtatcgttgattttattctacgtctttagttcagcagcgacgttggtatcaggcgcggttttctcacgcgtcaacgcgttatcaaccaaccggatgcggattgggttattcaataagctccaaaaaatgcagattaaatatttcgaccgtcattcagatggcgatattctcagccgctttacgagtgacttagataatatttacaatgcgatgaatcaagtgttgagccaacttgtatcaggcacggcgctcttaattggtttattgattatgatgtttagaaaagatgtgcagctcgcttgggtgacaattgcttccgtcccaatttcattcatccttgcttggatcatcattaataaagcgcaaaaatacgttaatgtgcaacaagatgaagtcgggaaactcaatggctacattaacgaaaaaatcacgggccaaaaagtgattattactaacagccttcaagaagaaacgattgatggcttcattgaacataatgaaaatgtccgcaaggcgactttaaaaggtcagatttattctgggatgatctttccgttgatgcaagggatgtcgttggtgaataccgcaattgtgatttcctatggtagctggttagcggtgaacggtgacattaaaaagtcgatcgctttgggcttagttgtaacattcgttcaatattcacaacaattctataaccagatcgcacaactttcatcgagttacagcatgattcaattggcaattaccggtgcccgccgagtgaatgaagtgtttgatgaagacgatgaagtgcgtccaaccgacggtgtgcaatttgagggcattgaacgctccgtgaccatggaacatgtcgactttagctatttaccaggtaagcaaattttgcatgatgtgaatatcgaagtggataagggccaaatgattgcgttggttggtccaactggttctgggaagacaaccgtcatgaacttgatgaatcggttctatgatgttgatcaaggcgcagtcaagattgatgacattgatatccgtgaaatggatttggatgcattacgctcgcacgtcggcatcgtgttgcaagaatccgtgcttttctcaggaacgattcgcgacaacattgtcttcgggaaacccgatgcaacagatgaagaagtggtggcagctgcccagcaagcccacattcatgacttcatcatgacgttagatgatggttatcaaacggctgtcagtgaagaagataacatcttcagtaccggtcagaaacaattgatcagtatcgcccggacgattatcaccggtccagcgctcttaattttggatgaagcgacaagtaacgtcgatacggtgactgaaagtcatatccaaaaagcgatggacaacgtcatccaaggccgaaccagtttcgtgattgcccatcgtttaaagacgattctcaatgcggatcgcattatcgtcctcaaagacggtcgcatcatcgaagaaggcagtcaccaagaattactagacgaaaaaggcttctacgccgaactgtacaacaatcagtttgtatttgaatagagtgcgacagcgagcgtttatattttgaggactagcctagtcagtcaaatgaccaatttattggccatttaattcaaccggcaacttgcccagtgcgctgagcgtcaattgatgcgttgcccgcgaaatggcggtatagaggcggttgtggccgacagttggctcggtataataattgttagtcagatcgtacaacaaaacgttatcaaattctaactctttagccagcgtcagcggtaaagtgaaggcgccggtttcggggagattcgtcgtttctgtggataagtggtggacatttttgaggccagttaaccgctcgtcaaagtcaccagcaggcgtgatgatggctaaggtttggtcagttggtagttggtcaatctgagcttggatttgggtgaggtagtcgttaaaatcagtcgcacaaatcgtcgttggccgcttgcctgctggttgaacggcatggacatctgttaaatcggtgaatagttgactaaataacgtcgttattgcaccggatgagcggtaacttgtgcgcagtgccgcagtttgtagttgtggaaaaatggtgggtaattgttcgaattgtactttatgcggggtgatactttgatgctgatcaccgaaaaccgtgaactgtgctttggggaaaagttgtttaaaaagagataacgtgcttgcgtgatagtcctgcacttcatcgataaagacctgcttaacgtttgggaagacgtgatgcgttaaataagcataaatctgagctgcaataacagcatcaatcggtgtttgacgggcaattatttgatcaaaagcaagccattgataaccgcttagctgatcagctaagtcttggtaatcatgacgaatcattttgcgtgctagcggtgctagtggttcatcttcgcgaattaagcggtcgaataagcgctgttgctcggtttcagtgaggctttcaagttgagttaaagcatctgctgattgggcttcatttgtgatgctttcctgtagacaacttgtgagttgttgctgagttgcttgtattcgtttatcaagcggggtatccaccggtgtttttaagaagaattggtagcttgttgcggcatcaatcgtcagcggtaaaccagggcttaaagattggaaatcgctcgcctgcaacgttaattgtgtgatggtcaaagtagctggttgatcagcgatggggagtgcggctagatcagaaggtaacaattgcgccaatagttgttgtagggttaagttgactggtgtttgttcacctaagtctggtaaaacttgggcgatatagtcttgaaataggcgatgcgttgaaaaatgaccgatgttttaccactgcccgcaatcccatcgatgagtaaatggtcagtcgtttgttgccgaataatcgcgttttgttccttttgaatcgtcgcggtaatggcgctcatttgcgttgttttggcttcttttaaagtggctaataacaagggatcttcgatggcaatctgcgtatcaaagaaatcgattagctgatcagcttgaatttggaactggcgccgtcggtcgagattgaccgcaatggcgcgaccgttagcttgataactggtggggccgaatgtttgctggtaataaacatcggcgataggtgaacgccaatcgtaaatcacaggatcgccggcttggtttgtgaagctagctgaaccaaggtaaaaatcttcggcgtctatttcctcaggaaaagtcagcgtgatttttgcaaagtagggttgctctaacagccgtaaggtctcatcatgacgtgcaacgagcgaatcggttttcaggttgagcatatcgatttccttgttgatactttctaaagcagcgaatgtatcaagattatcagcgtatgaatcgaaattgagtttggcttcaccggtgatctgcgctttgatggtgttgccgtttttctggttttgcgattgggcatcattgatggccgtcaaagtggtggttaattgttgataaacagtggatagatgcgcttgttcttgattgaaatcagtcgtcattcaaacagcccctttacaaagttgttcccctagtttagcaagcacgttcaaaaaaggagtgcgtcatcaacgggtagcttctgagcatttgcctaacttagcgaattggcgctgcaagcaccgctttgctaagtgtagcaaagcacaggaagctgttgatgaaagcacgttcaaaaaaggagcactgactgataagtcggtgctcctttttgcgttagtctgcttttatgatggtttcaattagatcaaaaaatccagctgcatcaacgtcgtagacgagtttagccggacgtccgtttttagttaagaacgtgcgcccgccggcaattccgtttggaatgacatcacatacaatggcttttgttttaacgattgttggatcaagaaggtaacaagttgttaaaacgtcccataaataataagttgaattagttttgaaatggaccagttgaggaacaaaggcgtaacaggtgccgataaagtccatcatggcattggcacgtttactagcccaacgttggcgaatcgccggcgttaagggaacattattcgtactttcgagcccgactaattcaatagggatttgtgtatcgaagacagttttcactgcttcgggatcccagaaggcattccattcagcagtaccatcagaatcgggttcagcaacgttgccttgttcaagaaaagaaccgcccatccaaagaagtttagcgattttatattcgatgcttggattgatggcgagtgcgcgtgccaaatcagttaatgggccggtaaagagcaatgtgacgggttcggttgcttgattgagtttagtgattagatcgagatgtgcggcttcaggactcagaggcgtttgaacggtgccacgttcattgagcacgggaagtgcatcgactgagtaagcgtcagttcgccattcttttggaaaaggatggactgcgcgtgagtcagaagcggccacagctaaccgcgctgattgatctgaaaacgtatcaatgattttacgactcgcgctaacggctggttcgacatatgaatcagcgccaattacgccgacgccaagtagtttgattgtcggcatttgtaggagcagagttaatgaaatcaaatcatcaacaccgccatcgtgattaaaatagacttgtgtttgcatggttcgcctcctgattgttcgttagttatcaattaatattagcattatctatatttcttagcaacaaatacaatataaacgaacaatattttataaaatgaaatcaatgtattgattttatgtcgataacgtgtttataataaattatcaaatttattgacggaggcttatttcatgaaaaaaagtttggtcgtacttttctcgacagtccttgtattaggtggcgtgttagccgggtgcgggagtcaaaagacagcatcaaagaaagcaacgcacacagccgctttagtcactgatggtggtgggattgatgataaatcttttaaccaatctgcctgggaaggtttggaaaaatggggtgctagtcatgatcttaaaaaaggggtcaatggttacaattacgcacaatcgagttctgatgcggactttttcccgaacattaataagttaatcaaggcaaaataccaaacgatttttgcgattggctataagttagataacgcggtcagccaatctgcaaagaataatccaaatgttaactttgcaatcatcgattcaaacgttaagaatcggaaaaacgtcgcgtccgtcaattttaaaacagaacaatcatcattcctagccggggttgccgctgcgaaaactactaagacgaataaagtcggctttgtcggtggaattgatagtgccgtcgtgaaaacattcgaagctggttttaaacaaggggtgaaagccgttaacccagcaatcaccgttgatgtgaaatatgctggttcatttacgaaagccgatgtcggccaatcattggcaaccgcgatgtacaacaacggcgcggatgttatttatcacgctgctggtggcactggcgctggcgtctttaccgctgctaagaacatttctaagggtggtcaaaaagtctgggtgattggtgttgatcaagatcaaaaagccgatgggaaatatgatggtggcaacgtcacattagcatctgccgttaaacaagttggcacagcagtggaagatcttgctaaccaagctaagaatgataaattccctggtggcaaaaccgtcacatatgatttgaaagacaaaggcgttgccttagtgaacgacaatgcttcccctgaaacatggcaagcagtcaaagaatatcaacaaaaaattgaagcaggcaccattaaagttgctgcagaataacgactattgaatgctaaaggatggcagcagttatcagccatcctttttgtatgcttaatgaatggagcgtaaaaatggcaaaaactgtgatagaaatgcagcacattacaaaacggttcggcgcctttaccgccaatgatgatatttcattaaccttgcaacagggtgaaatccttgccttgcttggtgaaaatggtgcggggaaatcaaccctgatgggtgttttgaccggacaattaaagccgactgcggggcaattactggtgaacggacaagcagtgaccttaaatggccctcgacatgcaaaagccctcgggattgggatggtacaccaacatttcatgttaattccggcttttacggtcttagaaaacattatcctgggtgacgaaccaactaaacagggacggattgactatgcaacggcgcggcaaaaggtcacggctttagtcgataaataccaactggcgctcgaccttgatcgaaaaatcgctgatatttcggtcgggatgcaacagcgggttgagattatcaaggcgctttaccgagaagcaacgacattgatttttgatgaaccgactgcagctttgacaccgaatgaaattcaagccttgcttgccatttttgagaagttaaaggcggaagggaagtcgttgatttttatcacgcataaactaaaggaaattaaacaagttgctgatcggtgcgtcgtgattcgtgccggacgtgtgattgatacggtactagtcgcacaaacggatccgacaaaattagcggaaatgatggttggccgtccgcaacaagcccccacaccgaaaatggctaatcaaggcgctgtgatgctatcggtggaacatgtcgctgctcgtgttgctaaacgcactgttctagatgatctgggattgaccgtgcatgcgggagaaattgttggaattgctgggattgatggcaacgggcagagtgagttaattcaggttttaaccggacaattaaaaccgcagtctggaaaaattgaattaggaggtcagtcattattgaaacggacaccacgccaaattagtgaacaaggcttagggtgcattccagaagatcgccagaatatcggtttgattttgccactgtcgattgctgaaaatttagcgctgaaggattattaccatcaaccgtatagtcatctaggctggcttaattatcgggtgatcaatcaaacggcgcagaaactgattaaacgattcgacattcggacgcaatctgaacaaacgcttgccggagaactttcaggtggcaatcagcaaaaagtggtggttgcgcgcgaaatcgccaaacaaccaaaagtcttgattgctgccaatccgacccgcggtgttgatgtaggtgcgattgaatatattcatcagagcttgattgaacaacggaaccaaggctgtgggattttacttgttagttttgaattagatgaaattttaaagttagctgaccgagtacttgtaatgcacgccggtcaaattgttggtgaagttgatccacaaaccacaacgagtcagacgctcggattattaatggccgggcaacaaccagtaggagggcgagacgaatgaataaacaacaatcttcaggattaatcattgcaatcctatccgttgtggcgggactgttagtgggcggagttgtgatgttggtttttggatattcgcctattcaaaattacagtaacctctttaatggcgcattcggagatatctattcgattggcgagacattacgcaatgcgactccgttaattttgacagcccttggcttttcaattgcgagcaaagccggctttttcaatattggtgggtcgggtcagctattagtgggctggtttggcgcgattgtctttgcactccactttaaaaatttaccggggattctcttgattcttggcgcgattttagcggggatgctgctcggtggcttttggtcttggttggccggttttttacgggcatactttgggaccagtgaagtgatcacaaccatcatgttgaactacatcgcattgtatttcgtcaattttgcgattaaacgttggttggcgccaaaagacagcgactcatcggccaacattgtccctaaagcaagcttgcggaccccttttttggaacagattaccaatcactcaacgtttcactggggctttttcatcgcgttagtcttggtgattgtgatgtggtggtatttgaaacggtcgaagactggatttgaaattaaggcagttggattgaacgaacaagctgcacgttacgcggggatgaatacgaaacaaacgattatgtgggcaatgctattatctggactactagctgggttagcgggggctgtcgatggtctagggaattatcaaaatatttccgtttcaaatgccttaccagatatcggctttaatggaatggcggtcgcgttattagcgaatgggcatccaatcgggattatctttgcggcgattttattctctgctttacagattggtggcttaagcatttccgtctactcaacaactccgacagaaatcgtcaatatcgtgattgcatcgattatcttcttcgtgggtgtgcgcttcttatttgaacaattactcaatcaccgcttactgaaaaaacacgcgttgatgaaagagaggcttgaaaaataatgacaatcacaatgattttaatgacgatttgtgcgaccacgttagtttacgcggcgccattgatttttacagccttgggtggtgctttttcagagcatagcggtgtgattaatgttggtttagaagggattatgattgttggggctttcagcagtgccgtctttacccttcaatttagtacggtttttggcggattgacgccgtggattgccttattggttggtggactgtttggtgcactgttctccttattacatgctttagcgaccgtaacattgcgcgctaatcacattattagtgggacggtgttaaacctattggcgcctgcattgtgtgtcttcttaacccgtgtgctgtatagcggtaaggggcaaacgccggtgattaatcaaagcatcggtaacttcacattccccggcttggcccaaattccagtgattggccccattttatttacgaagacgtcgttagtggcttacgctgcggttttggtcggcattatcagttggtatgtgctgtataaaacgcgatttgggctgcgcttgcggtcagtcggtgaaaatccagcggcagccgatacactgggcatcaatgtgagtcgttaccggtatatcggggtcatgttgtctggtttgttaggcggcattggtggcgcggtgatggcgcagtcgattacgttaaacttcagcgcagcgacgatttcaggtcagggcttcatggcattggcggcgatgatttttggtaagtggcatccaattggcgcgacaggtgcatcgattttcttcggactcgcacaaagtttgccgattatcggcggctacatcccaatactggccggtgtgaatagtgtctggttccagattgcaccatacgcgattacgattattattctggtgattttcttgggcaaggccgtcgcaccagcagcggatggcaaaaattatattaagagtcattaaaagatcattcaaaaaggcgaacacaattgcttgtgttcgcctttttaggctaatcctcagcggacaaccatttgcagtcgcacgctattctaagtagtcctcttttaattgtttgatttcttctggtttgagggccattgcctttgataggtagttttcgatgttgccgtattcttgattaaccgtgtcgcggacaagttctagattagcctgtgtaatgctcttagcgttcattgaagcgacctggctatcgttacttgaaattcgggttggggttgctgagctgagtcctaggacctcatttgagaggacatagtcggcaacgattgttttccagtcgacgccgagagcacttagaattaaaaaagttgcgacaccggtgcgatctttaccggctgagcaatggtaaaggactgcaccgtttgtatcgtgattatttaatagtacggtaaataaatcgcgataagctgcttgagcatgggagtcggtgaccaattgttggtacatccggtccatacttgatcgttcgggagtagcagcttcttttttaccaaaaagccgcattaggccttttttggctggctttttaggggtatcggcttggtcagtgaatggaaataccgaaagacgatggtaggttagttggttgtcatcaaatgggtcgggggcgaccttgatttcatgacgtgaacggaaatcgacatcgtaagcaacaccgtaatttaagagatcctcaatatcagttgcggttagcgcgttcaaactacctgaacgtaataatttgtgccatttaacggacttgccatcaaccgtttggtaaccgcctaattcgcgtaggttataacttcgtgttaaatctagaacccgttgttgttcttgcatgccaatccatcctttataatcagttatttctattgtataacgaagctgggtggtgtgcacccttattttaaatgttcgtgattcattcgtacacgatattgatgaaaatgaattttcaataagagtttattgacgtttgcagaaaaatctgctaatattttatcaaattttaaactggttatcgattaaagataatacgaacaatcgatgggtcggcggttaatttagttcacaaattggaggaagattatgtctgcatgggaatcaaagtttacaaaaaaagggtttacgttcgatgatgttttattaatacctgcggagagtcatgtactccccaacgaagtcgatttaggggtgcaacttgcaaagaatatcaagttaaacacaccaattatgagtgctagcatggataccgttacggaagcacccatggcaatcgctatggcgcgtcaaggtggtttaggcgtgattcataagaatatgagtattgaacgtcaagcagatgaagtcttgaaggttaaacgttcagaaaatggcgttattattgatccattttatttaacagcggataaacccgttagtgctgctgaagatttgatgcgtaaatatcgtattagtggtgtcccaatcgtttcaaatctcgatgatctaaaattagtcggcattattacgaaccgtgatttacgttttatctctgatttctctgctgaaatcggaaccgtgatgacgcacgaagcacttgtaaccgcacctgtcggcacttctttagaagaagctgaacaaatcctccaacaaaacagaattgaaaagttacctttagttggtgatgacggtcgcttagccggattaatcacaattaaggatattgaaaaagtgcaagaattcccgaatgcggctaaggatcaatatggtcgcttattagttgctgccgctgttggcgtcacaagcgatacttttgaacgggctgcagccttattgaaagcaggggctgatgcgatcattatcgatactgcgcatggtcattcagctggtgtgttacgtaagattagtgaaattcgcgaacgcttccctgaagcaaccttgattgctgggaatgtcgcaactgcagaaggcacaaaagccttgtatgatgctggggttgatgtcgttaaagtggggattggccctggttcaatctgtacaactcggattgtggctggtgtcggtgtaccacaattaacagccatctacgatgctgccagtgttgcccgcgaatatggcaaaaccatcattgctgatggtgggattaaatattctggggacatcgttaaagctcttgcagccggtggaaacgttgtgatgcttggtagtatgttagctgggactgacgaagcacctggcgaatttgaaatctatcaaggacgtcgtttcaaaacataccgtgggatgggcagcttggctgctatgtcgcatggttcatcagaccgttacttccaaagtggtgtgaatgaagccaacaagttagtcccagaaggcatcgaaggtcgtgtggctgccaaaggcgcactcggcgatgtaatttaccaattacttggtggcttacgttcagggatgggctacgttggtgctgctaatttacaggacctacaagataatgcacaatttgtccaaatctcaaatgctggtttgacagaatcacatccacatgatgtgcaaattaccaaagaagcacctaactattcagcacgttaattcaaatcatttctatcagggtttaagtcgagcgttttgcacgacttaaatcctttttttgtggttaaatgatggggaggatttaaagaattctttaactctaagtagaagatagtttgttacaatgaaagcgaatcatgcaaaatgatgttaaattaaacgaggtaacgattatgaaaattctaattgtagacgatgataaagaaattgttgaattattaagtatttatgttaaaaacgaaggttacgaacccattcaagccttcacgggtaaagaagccctgactaaaattgccacgaatcccgatattgatttgatgatcttggatattatgatgccgaatatgagtggtatcgaagtcattaaggcggtccgtaaggattcacaagtgcccattattgtggtgtctgccaagacaactgatatggacaagattcaaggcctcctaaccggtgcagatgactacgtttcaaaaccattcaatccattagaagtgatggcgcgggtgaagtcattgttacggcggagccaacaacaagtggccaacgaagtgccggatgtcttagaagttggtccgcttatcattaagcgcgactcacatgaagtgacgacgattaataacaagcaaatccaactcaccgcacttgaatttgggattttatacttacttgccagtcaccccaaccgggtcttttcagcggacgatatttttgaacgggtctggaaacaagaaagtatcgtctctgccaagacggtcatggtccatgtaagtcatttgcgcgacaaaattgaagaagcaaccgatggtgaaaaagtgattgaaaccgtctggggtgttgggtataaggtagaagtttaatggctgactatcaaggagaaaagaacctgcaaaaagtggcactaaccgctaaggaaaagagcgaactctttgccgagggtatcatcacggttattttgttattactattaaatttatcaatcatggtgctgttacaacaggcgattgtgaataatccgcaactaagcggcggcgtatggatgattaaaaacgccattacaattggtccgaatgaatggcatatttggagttggcaaaattggtttgtcatcttgatgggggttgccgatgtgttagtcgtctattggcggcttattcggcgttaccatcaaatgcagatgtggcacgtgattggtgagttgcattacattgccgatggtcatttggaccaccggattaatttgcgtgtcaaccgtgatttgcaacgcgtgatcgatagtgtgaacacgctggttgatagtactgtgcgttcaatggaagaagaacgcaagattgaaaagagtaaggacgaattgattaccaatgtcagtcatgatttgcggacgccgctgacttcaatcatcggatatcttggtttaattgaagataatcagtatcaaaccaaggaagaactaaccaaatatacgcatactgctttcgtgaaggcgcaacaaatgaaggttttagtcgaggatttatttgaatacacgaaggtgcggcaaacatcgactcccattaccaagacaacgtttgatatggagcagatgttagatcaattagcggccagttttgagttagaagcgaataagaaggggatgcagattaatgtaacttgtaatcctgcaccactgatgatggaagccgatactgaaaagcttggtcgagtcttcaataatttaattgctaatgctttgaaatatggcaagggtggcaaacaaattacgttggcggctgaaaaaatcggtcaagaggcgattattaaagtgtcaaatgatggtcaacaaattccaagtgattcattgaaccaactctttgaccgcttttatcgcgttgaagcatcgcgttcacaagaaacaggtggcactggacttgggttagcaattacccaaagtattgtcgcgttacatggcggttatatttatgctgattcgacgccagaattaaccagttttgtgatacacttacctttgaagttaggtcggcggattgatcctcaaactgctggcgcaaaatcagttaaggagtaatgttgtgtttaaaaaattagtacaatatgtaatggtcggcctattggcaattgcacccgttggcggtcttttgagtgcccagactaccaaagttgcagcggcaagtacgccggtgagtttgccgaccacccctcaaatcgatgcgagtgcagcaattgcgctcgacccagcaactggacaagtcttatacgaacaaaatgcggatcaggcgttgccaatcgcttcgatgacgaagatgattacagcctacatcgtgttagcgcaaattaagcaaggtaagttaacgtgggaacaaacggtgaagcccgatgacctcatttatcaattgagtcaaaataaggatttaacgaatgtgcctctacaagcggacggacaatataccgtcaaggcacttttccaagccatgatggtcgcttcggcgaatgatgcagccatgatgctcgccaaccaagtggccggttcacaaaaggattttgtcgatttaatgcggcaaaaagtggcggattggggcattcaagacgcacaactttattcagtgtccggcttgaacaatgaattcctcggcgctgaagtttatccaggcagtccggctgatgctgaaaatgaaatgagtgcggcagatgtcgcactcgtagcgcaaaagttgttggctgattatcctgaaattctcgaaacaaccaagcaagcgcattttacatttggcgcccaaacaagtgatgaaacggccatgtcaacgtggaacttaatgttacctggcgaaaataatgcaccgcaagactacgtggtcgatggtttaaaaaccgggacaacggacaaagcgggcgattgttttaccggaactgcgacgaaagatgggcaacggattctaacagtggtgatgcatgccaatggtgaagatactggccggcggttcattgaaactaacaagttaatgcaatatgtcttcgatggttgggaacaaaaacaattggcacaagccaatcagagtctcgcaccttataagacagcgacggttaaatatggtcgccaaaagacagtgcaattgattacgaacaaagctatttcaatgtgggtgccaaaaggaaccacagcagccaacattgactggcattaccaagcagtcaaaggtggtgcaaaacgccaattggaagcacctattaaaaagaatgtgcaaattggtcaagtgatgccacaattgaacggtgtcactacgcggtatatcggacaagcgccacaatcacaattacgcactaaaacggcggaccccaaagccaatttatttgttttaatcggtgaagggatcaaagaatttttcacgaacctattttagttggaattgaaacgcgacacttaacggtggcgcgtttttttatggctacgattataagccgtttcaagcgcagcatgattaaatcgtgctataattaaaaccattcacaaggattttgaggaggacgaaaatggctttaacattagatgcatgtacgttaattctaaaagagcatcatttattgaaaagtgtggcgcttaatggtgacccgactttaaatatgaccggcatcgcgtatgattcacggcaggtaactgaggatacgctctttttctgtaaagggaattttcgtcccgtctatttaacaaatgcaaaagaattaggggccgtaacatatgttgccgaacaagcgattgttgaaggcaacgggatgaacgccttaatcgtcacgaacgtccaaaaagcgatggcggttttatcagcggctttttatgattacccacaagatgatttatttatcgtggcttacaccgggaccaaaggcaagacaactgcggcctactttactcaatcgattttacaagcggcgacccgtcaaaaaacagcattattttcaacaattgatcgtgtcttagggcctaaaccagaggatcgcttcaaatcggatttaacgacaccagaaagtttagatttattccgcgacatgcgcaaagcagttgaaaacgggatgacgcacttagtgatggaagtttcgtcacaggcgtataagaaaaaccgagtgtacggcttaacgttcgatgttggctttttcctaaacatttcacctgatcacgtcggaccaaatgaacatcctaatttcgaagattacttacactgcaaattacaattattggtcaactcacgacactgtgtgattaacgcgcaaacacaatattttgcggatgtgtatgctgcagcaactacgacgactgctccggaatcaatttacttatttgccgaaacggattatcaacctacaattcccgtggcggttgatttccgctttgaaaatctagaaacgggcttagcagaaagtcggtttaaagttaccgcggcttctgaacgagccattcaacttggtgtttctggtgattaccaactgcgtttaattggggatttcaatgaaagcaacgcgacagctgcagtgattggtgctggtttggcaggggcggatttaatcgcagctcaacaaggaattcgcgacttgcagattccaggacggatggaaaccttagccgttccaggacatggtcaagtatatgttgattacgcgcataattatgccagcatgaaggcgctcttgagcttcttgcaaaaggaatacaatcaaccacgcctactagttgttgtcggtagtcctggcgataaaggtgtttctagacgtgctgggtttgcacaggtccttaatgaatatgcagatcgggccattttgacgactgatgatccgggatttgaagatccagcagccattgccgctgaaattttggcagggattgaccaggataaggtgacaaccaccatcgaaattgatcgtgcaacagcgattgaacaggtgattacggaaagtaaaccgggcgaaattgttgtcttagcggctaaaggggccgatgcttatcagaaagtacgcggggtcgatacaccatacccaactgatatggtgattgccaagcaagtggctgctaagttaagctaatcagcgtgtttcttaaagatttttaaatcagatgtggatttaattgctattctgaggtgggtctcgtagaataaagatgaatcaataggagttggagggggtattatgaaaaagatggttacagttagtacagttttggtatcaggactactattattaggggcttgtggtcaaagtagtacggcaaatcaagatgctgatgccaagcaaagttcaaccacggctagtcttaaagcacgtgaaagtagcgttgcaaaacgcgaaagtgaactttcaagtagtgcaagccaattaaaagcgagctccaaagcggcgatggcatcttcaactgaagtagagtccccacaaggaagttcatcaactgcaagtgttgctgaatcatcatcaactgctacaacggcaagtagcagtagtcaatctgcgagccaatctagcagcagtgcaccaacaacgactaccacgacaccacaacaaacaactgccgtagatggcaaccaagcgattaaattggtggttcaacaagttggctcacaatttggtcaaaccgcatcgtatttgaataatggcttaatcacacgcggtgggcaacaaggctatctcattaatatttacgtaccaaacgaagatcaaccacgggcaggttattttgttgtccaagcaacaggtgcagtggaacaaatctggtaattaaagagtgtggcttaagtcgatgctccgaggattaacacagggcgtgaataattacgcagtaattgtttgcgactcagggttaaccggaggagaatgacttacagaacacgtttaaagttcaacaattcaaaaaaggggttagggcaaaagcaatctttgtcccaatccctttttaagtgttttcagaaaaatgattgacaattagtgagactcgtgtaaaatatttttagtaaaacgtaataattacgatttagaaaagaggagaaaaagatgcgtaaaaaaggtttgggaatcatggcgggaatcttactgctaatgctattagtggctggttgtggtcagagtacaaaaaaggcgagtgggattcaagttgtatcgtcactcgatttttatggtgaagctgcacaagcggttttaggtaatcaaggtcacgtgacgtcgattatcaatagtcccagtctagatccacattcatacgaagcaacaaccaatgatgctaaactcgtggctaaggcggatattgtgattcaaaacgggcttggttacgacagctggttaaacaaagtcgttaagagtgcccaaccagatgaccaaactgtgttgacagtcagtcaattaatgaaacaatctaatggcgctaacgaacatttatggtatgatttaaagacgatgccaacattgaccaagcgattagtgactgaatttagcaagcgcgatccgaaacataaggcaacgtatcagcaaaatggtgcggcgtatcttaaaaagttagcttcgttagacgcacaactccaacaactaaaggcgcaggccaaaggaaaacaagtggctgttagtgaacccgtttttgactatgcattggctgaaatgggttacaaagtcgctaaccaacactttgccaaagcaattgaagatgggaccgatccatcaccaaaagatattacaacgatgcgggatttaattaaaacccatcagattgcctttttagtgattaataagcaagaagaaagtcccattattaaacaaatgcacgaactagcggataaagaaggggtgccagttgtacaagtaactgaaacactacccgctaaaaaaacatatttaacatggatgcaacagcaatttgatgcagttagaaaggctcaggattcaaaatgacagaattagtgaatgcacaacatttagggcttgcctttagtaatcgacaagtactaaaagatctcagttttacgatcaaacgtggtagcatgacgagtttaatcggtccaaacggggttggcaaaacaactttggtgcgcctattaatcggtaatttacaaccgacagaaggacaactcgtttttaacccggataagcaaaagctaaacatcggttatgtgccacagtttagaaatttagaagctgaatatccgttgtccattcgtagttttgtgagtttgaatcaacttgatagccacttaccgtggaaatcgcgcaaggaacgccaagcgcttgatcaaattttagaacagacccatctaaccgcgttgcaaaagacgaccgtggggaatgcttctggtggtgaaaagcaaaaagcgtatttagcccaagcattaatcagtaaaccagacttgttgattttagacgaatcgacagcgagtttggatattgaaactaaagaagaagtgatggccttggttgcagagttgaaccgggaacatggtttgacggttatttttgtgacccacgatttagaattggcccggaaatacacggatcaatacctatttttaaaacgaggtcaatatgaagccggaccaatgagtcagttggatcccaatttggaattagattaaagcggaggataagcgagtgttaacttttgattttatgcggcatgcctttgtcgccagtacttttatcgcaattacctgcggtttaatcggggtatttgttgttgcgcggaacatgtcatttctagcgcataccctatctgaaattggatttgccggagcctcatttggggttttcatgggaattgcaccattgaatgggatgttattgttcacgttactcagttcaatcacgattggtcagatgagtgccaaagaatcacggcgagaagcgtcgattagtgcgatttcaagtctgtttgtcggtttggggattctctttttatccctttcaaaccgaaatgctagttatgctaccaatattttatttggttcgattattggcattagcttagcagatgtttatcaattaatcatcttatctggggcaattatgattgggctgttgatcttttaccggtacttggtatttgattcatatgatccgattggcgctcaagcacaaggtttaaagaccaacttactatcgatttatttcttaattttattagccgtcagtgtcagcattgctgctcagattgtggggtcattactagtattcatcttagttacgattccggcgttcattgctaaatatttagcgaagagcgtacccgggatgttggcaatctcggttgccgcagcgttattaggggtttggctcggtttatggcttggttatctaacgaactggccagtgaccttcttcatcgccacgattgagtttggcttttactttattgcattgttatatcatcgacgaattagccgttaaaaaaacgtcctcaatcattgagggcgttttttcatgaggcttaatttaggttagcaagtagggcttcgagttgatccagacgttcttcgaaaactgcaaaagcgcgttcgagatagtcggcactcgtcatatcgacgccggcttgttgcataatttcaattgggtaggcggagctcccagcttttaggtagtctaaatagtgatcgagagcaccgggctgtttggtgctaatgccgttagtgagagtcgttgcagcagcaaagccggttgcgtattggtaaacataatagttcatatagaaatgtggaatccgagtccattcaagggcgatctgtggatcgttaacgacggcaggtccgtagtagcggctattaatgtccgcatattgttgtgacatgaactcggcagttagtggctgaccattggcagcggcagcatgcatcgcatgttcgaactcagcgaattgcgtttgacggaaaacagtgcctttaaaaccatccaaatagtagttcaatagataggcctggaccttaggatcagactgtgtttgcaataaatattccgttaagagattttcattggttgttgacgcaatttcggccacgaaaattggatagtcgccataaacataatcttgggtctgacgggtgaaggcgctgtggacactatgccccgtttcatggaccaatgtgtataagttgtttaaatcatcttgccagtttaataaaatgaagggattggtgtcataagcgccgccagaataggcgccactccgtttcccttggttttcacaaacatcgattaagcggtcatcaaaaatatgggcaacttgtttggcataatcgggtcctaggatcgacaatgcttctttggcagttgcttgcgcctgctcataagtgtaggttaatgcgggttttcctagaagtggtgtgtagagatcaaacatgtgtaattcagataaattaagttgctttttgcgtaattcagtatagcgatgtaaaagtggtaagtgttggttcacttgatcaaccaaggttgtatagacggcttctggaattgctttgggtgctagcgctgcttggcgtgcactatcgtagtgatggacttgagctaagtaattatgacctttgatttcagtggcaagcgtcgtcgcaaatgtatttttgaattgaccataagttttgtaaagtgcttcgaaggctgcttggcggactgatcggttggttgattgtaaaagttggctgtagaccccatctgaaagctgcaacgtttgtccgttttcgtcagtcacttctgggaattgtaaatccgagttgtctaagacgctgaaggtttgactagcagcactgaagatatctccggcagcagctaacaaggcttcttcttgcccagataagacatggtctcgactatcggtaatggtttgaatgaaatggctgtaaactgctaaattaggcgtcttggtaagccaatctgctaattgcccagccggaatagcaagaatcgcaggctctaaaaaggccgctgctgctgaaacttcggccgctaagctgtccacttgggcttgatagccttgataagttgcgttagcagtatcctgatcatttttcatgctagcataaacgtaaattgtttcgagctggcggaaagtggctaagatttgttcgattgtagcgactaattgatcagccgattcaaacggacgatcaagtgttttgagtgtgggtaattgcgttttaactttcttaaaggctacttcaaaagctgcatcatttttgaaaatcgtggttaagtcccatgtgagcttttctggaacagcatcgcggatggggagttgttgagttgacatatgaaacctccataattaagacttgcttacattttagcataaaagcgcttaggaaagtgttgttcaacaattgaaggaattattaaaattgtgtaacttttcttaaaaggcgttgtttgaaatgataattccgctataatagcaacataacattattaatgccggtatgatacataatagaagggaaacacctatgcagaattctaaatttttcggatctcgagaagcaaactacaaaaaagttaaaaagcatcgcacgatgaaagttttgatactcattctaacgctagtcctcttcggtggcggcgcgtatgcattacgcatcagtaatcaagtgaagtctgcagcgaataaaatttataaaccaaatgcgactaaaaaagccgctaaaacgattaaacataaaaaaccattctctattttattactcggagtggatactggtgctgagggccgggttgataaaggaaattccgatacaatgattgtggcgacagtcaatccagataaagagcaggtcaagttggtcagcattcctcgggatacgctagcgcagttacaaggcgcagatgaatttaacatgcagaagattaatgctgcctataatgttggtggttctgatatggcgatgtcgacggttgaaaagatgttcgatgtcccaattgattactatgtcacggttaacatggggggcttatcgaagattgttgacgctgtcggtggcgttgatgttgacgtaccatttacgttcgaatggaacgggagcgagtttactaagggcaagatgcatctgaaaggaaaagccgctttagactactcacgaatgcgttacgatgatccagaaggcgattatggccgtcaaaaacggcaaaaacaagttatcacgtcgatgattaattctgcagtctcgcttaaatctttgaccaactttgaatctatcttagactccttgtcagatagtgttgccactaacctcagttttgatgacatggtagcgattcaagcaaattatcgaaaggcagctaaatcaattgagtctgatgttttaactggacgtaatgctgatattgatggtagctcgtatcagattccaaccaatgaagaaatccaacgcgtttcagatgtcttgagaacgtcactgggattagaaaaaacaacgattaacaacgcagaaaccaaacaaaacgatttgaataccaactttacaggtgaagaaaatcatcaagagtttacggtttattctgaaagtgtcatgaatggtggaaagagtgctgcaacgacgacgcaaagtaactatggctactcgaacagtgcaacttatagtggtaacaacgattacagtaacacgaccaatacttggcaaacgcaacagtctacaaatcagtggaatgcgggctattaaaaatgaatggaaaagcggtcctttgcaaaaggggaccgctttttttgtggactaatttagttgcgtttaacaagtgattatttatgcaattagggggtgaacaatagtttacatttacaagggggaacggtattatttaaagcggtacgaaaaagacaaatgaaggatgtggcgtgtcgtgtatttgcttgtaaatgttgttggattactgatttttattggagtcggctttctgttctcaaagaaaaagaaagaaatcgattggcgctccgtcttaatcatgttagtgattaacttagtgcttgcttggtttttaacgagtttttcaatcgggcgggatattgttttaggtgcagcaaacggctttaactggttagtgcaagttgcctatactgggattgcttttgcactaccaagttgggtcaatgtgaaacaaatggatttcgttgctagcgtgttattaccaatcttgatgattatcccattattcgatatcttaacgtatatcggggtcttgccttgggtgattaaatggttaggccgtgggttagctaagattacgggacaaccaaagtttgaatcattctttgcagttgaaatgatgtttttaggcaataccgaagcattagctgtttcaagcttacaattgaaacaaatgaaagcagaacgaacattaacacttgcgatgatgtcaatgagctgtgtgacagcttccatcatcggcgcatatacacaaatgatgccgggccaatttattttaacggcgattccggtcaacattattaacgctattattgtcaccaatattttaaacccagtgaaagtcacacccgaagaagatacgattgctaaaatgggtgggagtggttccgcagctgttgaagcaaccgaaatggttgaaggcaaagtggaacgtgaaccattcttctcattcttaggtgattcaatcttaaatgctggtaaattagttttaattatcacggcaaacgtcatcgcctttgttgcgttggctgccttgatcgacaaggtgcttcaattagtgaacccttggattacccttgaacatttacttggaatcgtgatgttcccattcgcatggttaatgggacttgatgtgcaccacgcttttgaatttgcacaattcatggggacgaagttggtgaccaacgaattcgttgtcatgggtaaagtccaacattcaatcgggagcttcgcaccacattaccaagctgtcttaacggtcttcgtgacatcatttgccaacttctcaacagtcggcatgatcatcggcgccttcaaaggccttgtggaccgtgaaaagaacgacatgattgccaaaaacgtcggctacatgttgctatcaggaatcttagtatcacttctttcagcagcaacagtcggactatttgtatggtaatttaaagagtgcgcaggcagtcggttatcttctgaggattagcctaatcaggcagattaccgacaaagtcggtgatttgactgatgtagctaaccggaagaagatggctgccaaagcacgtttagagtgcgtttgatgacggttaacaactgagcattaatacaaaattcccaataatccgggtttttaggattattgggaattttagattaagcggaaattgttgtcatcaaaagcacgtttagagtgtgtcattaacgggttgcttttgaacacttgtctagtgttgtgaataatcagcacagctgattgtttgcaatacgtagcaaaacgcagaaagcagttaatgaaagcacgtttcaattcaatcaatttacggcgccaacttaatcttggtgccgcattattgggctatggccaagcggtaaggcaacaggttttgatcctgtcatgcgctggttcgaatccagctagctcaatccaactgcaaaacttgacggttaaagggctttgtgatatattttggacattataataaaatgtagccatcgataaagtacttggttttagcgatcaatcacagagagagtaaccccgttgaaagttacttattgattccagttgacagcttttgaggcttggatgaatatcccgctagcagatagcgttatcaacagctgaaattaaaggtggtaccgtgcgcaaagcacccttgtcgaaagacgagggtgctttttttattttttataaaatgtagattcagagaggattggcaaatatgagaacaagaacaacatattgtggattagttggggaagaatttctcaaccaagaagtcgtattacatggttgggttcaaagccaacggaattttgggaacttaattttcgttgatttaagagatcgcgaaggcatcgttcaattggtgtttaatcaagacacagatgcagatattttccaagtagcaagtaaattaaagagtgaatatgtcgttgaagtccaaggaacagtgatggcgcgtgatgaagcggccattaatccagacatgaagacggggaaaatcgaagtgattgttaaagacttagtggtcttgaacaaagctgaaaccctcccatttgaaatttcagataacaatacggcttctgaagatttgaaattgaagtatcgttatttggatcttagaagaccagaaatgcaaaatgccattaaaacacgggctgcgattactcgtgcagttcacagctattatgataacaatggttatttaaatatcgaaacaccgaacttgacgagttcaacacctgaaggcgcacgcgattatttggtgccttcacgggtttatccaggtagtttctacgcattaccgcaatcaccacaactcttcaaacaattattgatgtcagccggctttgataagtactatcaaattgcccgttgttttagagacgaagatttacgtggggatcgccaaccagaatttacacaaatcgatgttgaaacaacgttcttatcagacgttgaaattcaaaccgaaacagaaggtttattgaaaaaagttatgaaagacgtcaagggcatcgatgtgcaaacaccattcccacgtttgaaatggcaagatgcaatggacaagtatggttcagataaaccggatgttcgttttgatatgcaaattcaagatattacagaaatcgtgcaagattctgacttcaagccattctctgaagctgttgaagcaggccaatatgtgcgcgcaatcgtcgttaataatgccgcccctaaatattcacggaaagcgttagacgaacaacaacaatacattgaacgttacggcgctaagtcattgttgtgggcgaaatacgctggtgataaattatcaggggcttctgctaaaggcttattaccttaccaagaagcgcttgttgaacgtttgaacttaatggatgatgatttaattttaatcgttgccggtaacttccaagtggtttgtgatagcttaggttacttacgaacacacttcgctaaagaaatggatatgattgataagagccaatttgcatttacatgggttgttgattggccattatttgaatatgatgaaggctttggcaaatggattgcagcccaccatccattcacgcgtccacgtgatgaagatattccattgttggatactgatccacataaggcacatgcaatttcatacgatatcatcttgaatggttatgaattaggtggcggttcactccgtatttttaatccagaagtccaagaaaaaatgttatctgttttaggggttgcccctgaagtggctcaagaacgtttcggccacttattaaatgccatgaaattcggtttcccaccatcaggcggcttagcgattggtttggatcgtttcgcaatgttgctcgctagtcgcgacaatattcgtgacgtgattgccttccctaaaaattcccgggccacagaaccaatgaccaatgcgcctagtgaagtgacaccggaacaattagaagaattaggtatcgaagtgagtcctcaaaagaaggactaaccagcatcaaatgaagtcaattaagtaaaggagaattgccatggaagaaatgtttacgattttaggcggcatggggacggcggcaaccgaaactttcgtacatctaatcgatgaattaacaccggctaagaaggatcaagattatctgaattacgtcgtgttcaaccacgctgaaattccagatcgcacagcctacatcctcgacaacagccaagaaaatccgttgcccgtgatgttaaaagatattcgccaaatgaatttgttagcgccgaagttcatggtaatgacctgtaacacagcccattacttctacgacgaattacaagctgccgcagatttcgacattatccacatgccacgggaaacggtcaaacacatgcaacaaacaattcccggcttgaagaaaatcggtgttctcagcacaaccggaacccgacaagccggtatttatcaaaaagcaattgctgcttttggtcttgaaagtgttgttcccgaccaaacattgcaagatgccacgatgagtttgatttatgatgacattaaggcgactgggacattcagccatgacaagtatcaaaaaattgtcgatacaatgttaaatgactatgattgtgacgcggttattttgggctgtaccgaattgagtgttgcacagtcggaatttccattgtatcccgacaaagtgattgatccgatgacagtggtcggccaaaatattgtcgacgggctatacaacaagtagcaattactaattaagttttaacaaagagcatcctgagctgacgtatattgaacggcagtctggtatactacgataaatattgatatagaaggtgacagcatgcaagcaaacggtaaaaacttcacccccattttattggggagcgattttaacgtttacgggatggcccgttcgttttatgagatgtatcatgaacctgttaaggcctacgcaagtcaggaattagcaccaactcggtttacaaaaatcgtcgatttagaattgattccaggcttcagtgaagatcctggattcattactgaaatgctaaaattaaaggaaatctatcgcgatagcgatggcccagtcattttgattggctgtggtgatggctatgcgagcttaatttcacaacataaagcggaattggaagatgtctttgtttgtccatatattgatcacgatttactagaaaagttgacttataaggaaaccttctatgaaatctgtgacaaatatgacttaccttatcccaagacgcacatcattaccaagcaaatggttgaagataatcaggtggaacaacctttccaatatccagtggcgttaaaaccggcggattctgtggaatggcttgatgtgcattttgaagggcgcaaaaaagctttcacgattaaaagtgaagctgaattccaagacatcatgcgaaaagtatatgaaaatggctaccaatcagacatgattttacaagacttcattcctggggatgacagtcggatgcacgtgatgaacatctatgttgaccaacaacatcacgtgaagatgatgtgtctgggccatccattattggaagatccagcacccgcagctattgggaattacgtggcgattttgccggaatacaacgcacaaatttatcaacaagtccaaaaattccttgaagatatcgagtttacgggttatgccaacctcgatatgaaatatgatgaacgcgataacacctacaagttattcgacatcaatttacggatgggccgcagtagtttctttgttaccttgaacggctataacttagcccaatgggtggtgcgcgattacgtgacaaacgacttgcaagatgaacctgttgtttgggcgaataaagatgaagacagtcccgcactttggttgggcgtttcagtggatgtctttaagaaatatgcccgcaataatgccgaaaaagacaaggcattggcactcatcaaacaaaaacgttacggcaccacttttgaatatagcaaagatatgaatctcaaacgctggctattgattaaatggatgttgcacaattaccgcaaaaatttcgcgaagttcttcaaagaaaataaggaataacgtcgcttaaaactttaaaaagcacatcatcgttgaacgatgatgtgcttttttagcagcattagaaaaaatcccgccgcagggttgcaggtttgtggtaaatgatgcaatatgaagttggagaatcgctgtggcatttatggtttgatttttgaatgagtgctttatttttgagacaaaaacgatataataaatcaaacaataaatttacaatgctagccgttattttgactgtcaattagcgttaaagtgcttttagatgcgattatgaatgtagcaagtaattgaaaaaggtggaaaaacgatgcactcattagatattgagcgattaaaagagatgtcaaactttgaagttgccgctttgttcttagaaaattcagaaaaaaatacaatgcataatgcgccaattaatgttggtcgtggggaccctaactggattaatacgcgggcgcgattagcttttaataagcttgtcgaatttggcgtcgaagaatctgctaagaaaattaacgaggctgatggagatatggcgggctacgttgataaagcagggattgcacaacggctgcatgcctaccttgatgccagtcataaaacagatcgatttatattagcctttttagattataccgaaaagcacatgggcctcaatcaggatgatttggttcacgaatttgtcgacggtgcgattggcaatcactatccagtaccttcgagaagtttaatcaatgtggaaaaaatcctaaataaataccttgaagtgtcactatataatggtgaaaaattagctaatcaaacggatgtcttcccaacagagggcggaacagccgcaatggtttatttgttcaaggaattgaagatcagccatatcttacggcctggcgacacgattgccatcaataccccaatctttaccccttatttgcaaatcccagaattaagtgaatataaattaaagcaattcgatgtgagttccgttgaagatgacaactggcaaatgatggacgccaagtttgaagaattgaaggacccgacaatcaaagccttttttgtggttaatccaacgaaccccacttcgcgggctttcagcaaacacgcgttagctaagattaaagaggtcgttgaagcaaacccagaaattatcatcattacggatgatgtttatgggacttttgtgaatgatttccaaacaatttactcaattgccccccgaaatacgatgttagtttattcgtattcaaaactttatggggcaactgggcatcgtttaggcttactagcagtgcaccaagataatgtttttgatgaaattattgctaagcgaacggctgaagaaccagcgattaaggcagcttttgaaaaacggtactcagttgtggcgcctaatccgcttgcgatgaaattcattgatcgaacagtggctgacagtcgtgaaatcgcgttgtaccacaccgcgggattatcaacaccacaacaaattttgatggcactatttagtttgaccagcttaattcacgaaggtgaaaaggatccatacatcgaagcttccaagaaaatggttgatgcgcgatacaacgctttttgggaatcgatgggcatggaatgtgatcactctaaagaaaacgctgaatattatgcggtatttaacatctatgattttgctgaaagaaagtatgggcatgaattccacgactatttcgaaaagcacgtgagctatcttgatttcgaagataaacttgcagctaaatacggcgttgttgtgatggatggggcaggaatggggactgatgatggctacttgcggatttcattagctaaccaacccgctgaaaattatgccattactgggaaccggattgcccaattactagcagaatactatacccaatttcaagcacattaaataaaaagtaggcgctgtgaggcattttttgcaagatagtctgatctggagcgcgcgaggtgctgaggcaataaacattgtctcagcacctctttttttattggcctgcattaataattgaacatttatcgagtctgtttgtagacgacttttaggaatcatgtataataagcttgagataaaatgatttataaaggagtttagcatggccgacttagtttatcagaatattatcgcggacttaaaaaaagcgattaacgcagaatcatttcccagcatgaaattacccgatgaacggacgttgactgaacactatcaagtgagtcgtagctcggtcaaacgtgcgttaaacgttatgtctaatcaagggatcattttcaaaaaacggggttcaggaacctttattaatccactttatttaaagggtggctcgttttttaattacaatggctctaacctaggggttaccgacagttttaaagccggtaatcggacaccggggattaaattattagatttccaagtcatcaagccgagcgcggaattgcaacgagacttgttcctgaaaccagatgattttgtttacgaaatcaagcgtctccggttgtttgatgatgaaccattcatgattgaaacgggcttcattccgattaaggtaatgcccgaattgacagaaaaaattgtgtcgagttcaatctttaactacttggaaaccgagaaaaatcaagaagtcacacgcgctttcctgtcaattttcgcggaaccatcaactgatgatgatcaagcgcacttaaagttgaaaccgacggaaccagttggcatcatggaagggattttcttcttagacgatgggacaccgtttgaattttcaacgatgcgcctgcactaccaatacatgaaatataatacattcgttacggttagcggtcgcgaatagggccgctatttttagattcaaaaaattggtacgacccaatattaaaaatggttgacttttttaaaaagtttagtatgataagagagtagtcagaaacaacaaagttgcaaaagctgcgactggaacttaaagtaaagctattaggaacttttttaaaattaaaaaggggtgctattaaaatgacagattattcaagcaaagaataccttgctaaagttgacgcattttggcgggctgcaaattatatctcagttggtcaattatacttaaaagataacccactattgaaacgtcctttggaagcaaaagatgttaaggtaaaaccaattggtcactgggggacaatctcaggccaaaacttcctatatgctcatttaaaccgtgcaattaataaatataacttaaacatgttctacgttgaaggcccaggtcacggtggtcaagtgatggtctcaaactcatatttagatggtagctattcagaaatctatccagaaatttctcaagatgttgaagggatgaagaaattattcaaacaattctcattcccaggcggcgttgcttctcatgcggctcctgaaacacctggttcaatccatgaaggcggcgaacttggttattcattatcacacggtgttggtgcgattttagataacccagacgtgattgctgctgttgttgtgggtgatggggaagctgaaactggcccattagctgcatcatggttatcaagcacattcatcaatcctaagaatgatggtgctgtcttaccaatcttgaacttaaacggtttcaagatttctaacccaacaattctttcacgcaagagtgatgaagaattaacgaaatacttcgaaggcaatggttgggaaccaatctttgttgaaggcgacgaccctgaaaagatgcacccagcaactgctgctgcaatggatgaagccatcgaaaaaatccaagcaattcaaaagaatgcgcgtgaaaacggcgattcatctcgtccagtatggccaatgatcgtcttccgcgcacctaagggttggactggtcctaagacatgggatggcgtaccaatcgaaaattcattccgtgcgcaccaaattccagtgccaattgacagtgctgacatgcaacatgttgatgcattagtagattggatgaaatcataccgtccagaagaattgtttacagaagcaggtcaattaaaacctgaaatcgcagaaattgcacctaaaggcgatcaacggatggctgctaacccaatcaccaatggtgggattgatcctaaaccattacgcttaccagattaccgtgattatgctgtggataattcagaacacggtaaagtcgttgcgcaagacatgattattttaggcgaatatgttcgtgatatcatcaaagacaacgatcaaaataaaaacttcagaatcttcggccctgatgaaacaatgtcaaaccgtttgaaccatatttttgaagcaacaaaccgtcaatggatggaatcaatcaaagaaccaaacgatcaatacatggcaacagaaggccgtgttcttgattcacaattatcagaacatcaagctgaaggttggttagaaggttatgtcctaactggtcgtcatggtttctttgcaagttacgaatcattcttgcgcgttgtggattcaatgttaacacaacacttcaagtggttacgtaaggctgatgaacaagcatggcgtaacaagtatccttcattgaacgtgattgccacatcaactgttttccaacaagatcacaatggttacacacatcaagatccaggtatcttaacacacttagctgaaaagaaacctgaattcattcgtgaatacttacctgctgatgctaacacgttgttagcaacaatggatactgtcttcaagagccaagaaaagatcaatttagtggttgcttcaaaacacccacgtcaacaatggttctcaattgacgaagcaacagtcttagttaagaatggtttgaagattattgactgggcaagtacagaccaagatgctgaaccagatgttgtgattgcagctgctgggacagaaccaacacttgaaagtttggctgcaatctcaatcttgcacaaacaatatcctgacatgaagattcgtttcattaacgttgttgatttattgaaacttcgttcacctaaagtggaccctcgtggtttaacagatgaagaattcgacatgtactttacaaaagacaaaccagtggtcttcgcattccatggtttcgaaggcttagtacgtgatatcttctttgaccgtcacaaccataaccttcatgttcatggctaccgtgaaaatggtgatattacaacaccattcgacatgcgtgtcttgaatcaaatggatcgtttcagtctatctaaagaagttgcaggtgacgtacttggtgatcaagctggtcaattcgcacaatcaatggatgacatggttgctaaacacaatcaatacattcgcaatgaaggtactgatttaccagaagttgaagaatggcaatggacaccactccgttaatgcggtgagagtgcgtcactaacggtttgcttttaagcatttgcctaatcaggcggattgccggtaaagccggtgatgtgactgatgtagcaaggcgcaggaggcagttagtgtaagcacgtttaagtggaagagtgcgtttgaactggttatcttctgagcattaactggatttgacgaattgacgatgtaatcgtcgatttggcaaatttggttaagcgcaggaagatggttcaaaaagcacgtttaaatgatagaattctactatcagaagaagggtctgggacaaacatacttttgtcctagattctttttttgtggattagtggtctctgagcctttatttttaggcataataacggtaaactagtagacaagtataattttagaaagaggcgttttttttatggcaaaaaataaaatccgagtgcggtatgcgccaagtccaacaggtcatttgcacatcgggaatgctcgtacagcattgtttaactatttatttgcacgtcacaacaaagggactttcgtgattcggattgaagatactgacacgaaaagaaacattgctgacggtgaaaacagtcagttagataatttgaagtggctaggtatggattgggatgaaggtccagataagcctggtgactttggtccttatcgtcaatcagaacgtcgcgaaatttacacgcctttaattgaagagttagtggctaagggattagcttacgaatcatacaaaacagaagatgaattaactgaagaacgggaagcccaaaaagcagctggcgaagcaccacgttacatctacgaatacgaaggtatgagtgatgatgaaattaaggctagccaagaagctgctaaagcaaaaggcttacaaccagttgttcgtttacgtcttcctaaggatcacgtttacaagtttgatgacattgttaaaggtgaaatcagctttgaatcagatcgtttaggtggcgactttgtcatcatgaaacgcgatgggatgccaacatataactttgccgttgtcgttgatgatcacttgatggaaatcacccatgtcttgcgtggggacgatcatatcgccaacacgccaaaacaattggctgtctacgaagcctttggttgggaaccaccagtctttggccacatgacattgatcatcaatactgaaacaggtaagaagttaagtaaacgtgatgaatcagtgcttcaatttatcgaacaataccgcgaattgggttacttaccagaagcgatgtttaactttatcgccctattaggttggtcaccagttggcgaaagcgaattgttcaatcgccaagaattcatcaaacaatttgatccaaaacgtttgagcaaatcaccagctagtttcgatcaaaagaaactcgaatgggtgaataaccaatacgttaaacaatcagatccaaacaaaatcatggatctttcgttagaaagcttgattaaagcgggtaaaatcgctgaaaatcctgatagcaaaatgatcgaatgggcccgtcatttgattgcgttataccaagatcaaatgagctacacagctcaaatcgttgaaatgtcagatgtcttctttgaagaacctgaacaattagacgccgaagcgcttgaagaattaaataacgaaacagcatccgttgttttgaaggaattcagcgaacgcttgaaagatttaacattattcacagcaccacggattatgcaaatcattaaaggcatccaaaaagatacgaagattaaaggccgtcaattgtacatgccaattcggattgcaacgactcgcgaaatgcatggtccatcattacctgattcaatcgaattgttaggtaaagaccgtgtcctagcccatcttgaaaagacattagcagaaattaaataaagtacgtttgaaacgggtagcttctgagcattaacaggatttgacgaattaccgatgcaatcggcgatttggcaaatttggttaagcgcaggaagctgtttaaaaaagcacgtttaagaatagagtgcgtttggttgcgttcagcaactgagcattaataaaaaattggtagttatccagaattcaggatgactaccaatttggtagattgtaaaattaatccgaacgctgttcggacaaaaaagatcagcttcctttaaaatggtgtttaccacaaacccatcttttaggagctgatcttttgtctagtataacctattccgaacgaattaaaatcgaaaccttttgtgaactagggctgtccaatatccaaatgggcgttcggctgaaccgatcaccgtcaacaatttcttatgaattatctcgatgtcaaccttatcaggctgaattagcacaaacagatgccgaatacaagcgatcacgatgtggtcggaaaactaagctgagcgatgagttaaagcaaaaaattctcaaccatttacgtctaagctggtcaccaggaatgattgctcacgaatttaaactagctactaaatctatttataattggctaaatcaggggagaattggtttctccttgaatgatctacctgaacatggcgtacgccaacggcgtaacgttgaccaacgatccaaatataatcaatctttggggcgatcaattgaacagcgtcccatgatgattaatcaacgtaagcgcatcggcgattttgaactagatacagtcgttggtcctcgtgggcatagtaaggcagttttattaactttaatcgatcgcaaatcacggttcctttgggcataccggttaaaagatcggacgacagcgactgttaatgaagcactaactaagttcctaaccacttttaatggtccggtgcacagctttactgtggaccgtggcactgagtttagtgggctagtatcacttgaatcacaatatggtattaagacctattactgccatgcttatactccagctgaacgtggtagtaatgaacgctttaatcggaatttacgttatttttatcctaaagggactcgttttgagcacattagtgctcaagatttaacgacgacgttactccaaattaaccagcgaccgcttaaaatactcgactggcaaacaccgtatcaggttatgctgacaaatttgtccaaaaattcggattaaatttgcaatctaccattttttattaagcggaagttggtgcaaccaaaaagcacgtttagatgttcaaaatagaacagcaaaaaagctgaggttgaagtatttcttcaacctcagcttttttatttttgtctagtccgatcaatttcagtccgaatggctttgaaactttgttctgtttgtgggccattattaacggcgaccatcataaacagactatcgacgatgctgatttgtgcaattaacgcgtgtagtgcttcggcgcggtaattggtttcttcggaaatggacaacagtgtcacatcacccaatttagcgagggttgaattgccaaaactggtgatgacaatcagtggaacgtgacgttcttttaagatgcgtgcaatttctaaagcatctttattttgaccactatgtgaaataatcagcgcacagtcttgttcggtgagttgggtggcctgcatcaattgtagatggtagtcttggctgtaaacagttggaatcgcagttcgtaaaaatttgtggtagccatcttgagcgacgattccagaagcgcccaagccaaataaacttaagcgcttggcctggttgatataatcaacggcttgccgtaattgcgcttcagtcagtagtgaacgagttgctttgagcgcattagtattggatgcgaaaattttatcggccatggtcagatagtcatcattattactaatttcatggaagagtggattatctgttggggttgcttgtttagcaagtaacgccattttgagtgcctggaagtttgcgaaggtcaacattttggcgaaacgggaaatagtggctgttgaaacaccacagtcagccgcaaattcttgaatcgttaaactttgattgaaatgttcagtttttaagatgtaatctgcgatttgtttgtatttttcacttaaattcgtgtagtacgcacggagtaaggaatcgatgttttgtgtcattgaagtgcccccctgttatcgatagtatagcataaaaaacaacaaagaaaattattttctcaaaaagggttgattaaagaaaataatttacatataatgaagacattaataaaagtgacatgaaattgtggataaggggactagcaaagatgaaattagcaatgattggtttaggcaaaatggggattaacttggtcgctaacttacgacgtaatgggcacgaggttgtcgcctttgacttaaatgaagcagcggttcaagaagcaacccgcttaggtgcattacctgcaaaggatattgatgatgtggtggcacaattgccacaacctaaaattgtgtggagcatgttacctgctggtaagccaacacaagccacaatcgaaacgttaagtaccaaattgacagccggtgacattgtcattgatggtggtaattcatttttcgaagattctaaacaacacaatgcattgcttgccgcaaaagggattcatttcttcgatgtcggaacttctggtgggatgagcggtgctaacgcagacggaaacttcatgatcggcggtgacagcgcggaagtcttcaaacagattgaaccgatttttaaagatattgctcaaaaagatggctatctctataccgggaaggctggtagtggtcattatctcaaaatggtgcataatggaattgaatacggcatgatgcaatctatcgctgaaggattcgatgtgttatcacatggtgagtttgaatatgataacgaagcggttgctaaggtttggagtaatggttctgtgattcgcggctggttgatggaattagcggaatctgcttttgcaaaagaccctaacttagaaggcttaaaaggtatcatgcactcatcaggtgaaggaaaatggacattagatgaagccttgaaattacaagtcccaacaccggtcattggtttatcattgatgatgcggtatcgttcacttgaagatgatacattcactggtaaagttgtcgctgctttacgaaatgaattcggcggccatgcagttgataagaaataagtggtatcctagtaagtagtcagtaaacaccacataaacgaggtaattatgatgaaatatatgattggtgcggatattggaacaacaagtacgaaagcggttttatatgatttaaaagggaatgttaaagcttacgcaaacgttggttatcctttatatcaaaccgtacccgatatggcagaagaagatccggatgaaatttttaatgcagtgtcagaagtattacgacaggtgatgcgcaagggcaacgttcaagccggcgaattacagggcgttagtttctcggctgcgatgcacagcttgattctgatggatgcaaatgatcaaccgctaactcgggcaattacttgggcggataatagagctgctaaagcaagtcaacaattgaaagaaaatgggttgggccaagccatttatcaacacactggcacaccaatccatccgatggcgccactttcaaaactgatttggctgaaagaagcgcaacctgaattgttcaaccaagctagtcaattcatcgatattaaaacgtatgtcttccaaaaacttttccatacgtatcaaatggattattcaatcgcttcagcaaccggcttgttcaacatttttaatttagattgggatcaacaagcccttgaagtggctggtgtcacacgccaacaactacctgaattagtcgaaccaacggattatgttaaagggattgatccgatctatggtgaattaaccggcattggtgctgaagtaccatttatctttggcgccagcgatggggttttatcaaaccttggggtaaatgcaattgatccaggcgtagtcgccgttactatcgggacaagcggtgccgtgcgagtggttgttgatcatccagtggttgatccaaacggtaaattattctgttacgccttaaccaaggataaatgggtggtcggtggaccagtcaataacgggggaattgtcttccgttgggtgcgcgatcaactttttgcacctgaaaaaatcaaggctgaacaaatgcatgtttcaacatacgatattttgacacaaattgcggcagaaattccggctggttcagatggactcttattccatccttacttgggtggcgaacgggcaccaatctgggatgcagatgcacgtggatcatacttcggtttgacgcggcaacatacgcgggcgcacatggtgcgtgcagcgcttgaaggcatcgtttataacttatacatggtgatgctgatgattgaaggtgtggcaggtaaaccaaagagtattcaggcaacgggtggcttctcccgttcagaattatggcgcccaatgttggcggatgtctttgaacaagacgtcacgattccagagagtttcgaaagctcatgtttaggtgctgctgtcttagggatgtatagtttaggcttagtggatgatctatcagctgtcaaagaaatggttggtgtgacgaatgtgcatcatccagaagaagccaactttgaagtttatcgcgaactattaccaatctggattcgattaacacgggaattaaatacggaatacggcgcaattgctgacttccaacgcaaacatatgcaagttaaagagtaacgaagtgaactgggtctgaaagcccagttacttttaacaatatcatgatagcgcaaacattattgaaaatagggaaaattatggcattagtagtcctattattgggcattatcttattactcgcccttattattcgatttaagatcaatacgtttatcgctttagttataacggcaatggccgttggggttggcctaggtatgccattaacggacattgcaaccagtgttcaaaacgggattggcggtcaacttggtgagctctcaattgtctttggctttggtgccatgatggggcggttagttgccgacgctggtggcgcgtttagaatcgcgcataccttaatcgatatgttcggtaaaaaagacttcaaattgcaattatgttggcttcgttcatcattgggattgccttattctttgaagttgggatggtcttgttagtaccaatcgttttcgcgattgcaatcgaagtaagtgtgtcaattttgtaccttggaattccgatggctgcagcactttctgtcacacatgggttcttgccaccccatccagcaccaacagcaattacctcagctttaggggcaaatgctggtcacgtattgttatatggggtcttaattgcgatcccttcagtgattattgccggtccattattcactaagattgcaaaacgcctagtaccagatgcgttcgcgcgccaaggtaatctgacggcacttgggcctcagaaaacctttaaattagacgaaacaccggggtttggaattagtgtcataacctcattattcccagtcattttgatggctgtcaccacgatttatcaaatggcctttaacggcgggaaattacctaaaaatccaacgatgctggattcaatcgtcggttttatcgggacaccagccattgcaatgaccatttcattgatggttgcgatgtatacgatgggttgggcgcgtcggattaaaaccctagcgattatgaagacgattgaagaagccgttaaatcaatcgcgatgtcactcctagtcattggtgggggtggtgcgtttaaacaaatcctcatcgacggtggggttggcgatagtgtcactaaattattcgcaaatgccaatttatcaccactattattaggttggttaatcgcagttgtcttacgggtggcattgggttcagcaactgttgcgtcattgacggcggcaggcttggtcttaccactaatgcaatcagccggtgtgaaccctgcactgatggtcctttcaattggagccggcagtttagcggcttcccacgtgaatgatgccgggttctggatgttcaaggaatactttgatttaagtgtcaaagaaacccttgcaacttggacagttttggaaacattgatttcgattgttgggttaattggcgttttactattaagtttagtcgtctaaataaaagttaaatgacgttggctgttaaagacagtcaacgtcatttttaatagcacttaaggtgggcaattatttgtaatcggttacctaaaaaaacgctgagaaacagcttttttttaatcttgttcagggacaacatcaaagagatatgatagaatgggtaaggattaatttgaacactggagacgatcagagttaggtcatcctaaaatcaaagtcattgaatcctaatagttgaacgactcaatcgaagagaaagaggtacttatatggataagaagcagcgagaagattcacaaaagggtgaacttaatcaacaaaagcatgagaaattcatacactatgctgatggcacgagtcttgaagaaattaataacacggttgcgattcccaagaacgctggtttttggcggacgttgatggcctttatgggacctggtgcgttagtggccgttggttatatggatccagggaactggatcacgtcaatcgccggtggtgcgcaatacgcatacaccttgatcagtgtgatcctagtatcaaacttaattgcgatgttattacaagcaatggcagcgcgtttaggaattgtgaccggaatggatttagcgcagatgacgcgggccaaaaccggtaaaaagatggggattttcctctggattgtcaccgaattagcaattatggcgaccgacatcgccgaaattattggttccgcaattgcgttagaactgattttcaacatcccattgctctggggtgtcttaattaccgcatttgacgtcttgctattattactattaatgaaacttggtttccggaagatcgaagcgattgtcgcaaccttggtggccgttattttattcgttttcttatacgaagtgattctagcgcaaccaaatatgggcgacgtaatgcgcggatttgtaccaagtacacggattgttaccaaccagaagatgctattcttggcattagggattgtcggggcaactgttatgccgcataatctctacttgcattcgtcaatcgcacaagcacgtcaatatgaccgtgacgattacgccgaaaagaagaaagcaatcaagtttacagtcattgattcaaacattcaattatcagtcgcatttatcgttaactgtttactcttagttttaggggcagcaatgttctttggaactaacagtgatttaggacgattcgttgacttattcaatgctttacaaaacaaagaaattgttgggagcattgctagcccaatgttgagtttactctttgccgttgctttattagcttctggtcaaaattcaaccatcacagggacactttcaggacaaatcgtcatggaaggtttcgttcgcatgaagattccattgtgggcacgacgggtgattacccgtgggttatcaatcttacctgttattattttcacggtttactaccatgggaacgaagcacaagttgaaaacctcttgatttactcacaagtcttcttgagtgttgcattgccagtctcgatgattccattgacaatgttcacgagtgatgaaaaaatcatgggcccattcgttaaccgcccttgggtgaaatatacggcatggtttgtcacaattgtgttgacgcttttaaatatctatttgattctacaaacaatcggcctagttggctaatgaataggtgctcgttaatccgtaaattgatatggattgacgagcgctttttttgttcggtatgctagactagagataaggtattattttggagggattttattgtttgaagtaacgagtgtgcatatcattattcgactgctactggcaaccttaattgctgggattatcggatctgatcgggaatataagaaccgcccagccggaatgcggacacacattctggtctgcattggtgcgtgtgtgattgcgatgattcagcaggaaatcgcagcgcaaaacgttcaatttgcattagcgcatagtgcgattagtaccactattcgttctgatcaagcgcggctgattgcacaagttgtcagtgggattggttttttaggagctggaacgattattgtcacccgccacaagattcaaggattgacgacggcggcctcactttgggctactgcgggattaggacttgcaattgggatgggctactatcaaattgcggtgatcagtgcggtctttgtcattttcgtgattgtcttcttgaaaaagattattcacatcaatacgttgaaaaaaatcgaaattaagtataagcataaattggaaaccaaggagtttattcagagctattttgaacaacatcagattcaaattcgcgatgtgaacttctcagtaacgcaaaacgaacgtgatacgatttacactaacgtctatcgcatcgaaattccccgggaaatgcaatatgcagaaattgtggaagatatctcgatgaataagaacatcatgacgattcgaatggtcagtgtctaaaagagtgcgcaagcaggcgtttatatttcgagtattaactggatttgtctgcaatcgccgatgcgacaagtttggttaagcacaggaatatgcctgctggagcacgtttaaaaaaagtgtgctgtctcaatcgggaaatacatttacgaaaaaagaagccccctgataaaaaagtttatcagggggcttctttttatttcagtctaattaaacgcaatttgtctgtctcttggtaagattaagttgagaataattgcggcaagcgcacaaatcgaaattggtgattcaagtaagtattggatcatttgaggcgttgctttcaccaatgattgtggcatgatgatgatggcgatacatagaatgattggaattccgatgatgtacatatcacgttcttgggtgtgtagtgtgcgaataacatttaacccgttgagcatgatagttgaacaaatgatggcgaaaatcccaccaataactggggctggaatcgctgataagaaggccgctaatttattaaagaagccgaagatgataaaccaaatcccggcagaaacgaatacttttttactagcaacaccggtgattgaaataatgccggcgttagttgcataccctgtaactggtgagccgcctaagagtgcagcgattaaacagctaattccttcaccgataatcccgtgattccattgtttcttactgatgggcgaatccgtaacggcactcattgcaaaccaagtcccggtcgtttcggtcattaaaacggcgtagataatgacgaaggtcatgattgctgtcatcgaaaagtgcataccatagtggaatgcggtgaaacttggcaagctaaaccaactcgcttcgttcacactttgccagtcaaatttaccaagcatggttgctaaaacagttccgcctaataaggcgatgatgatggaactaactttgaagagtttttgtaatttagggaagtagatacctagcgaaacacaaagaattagaatggcgacggtcacaacagccaggagtaagttctcattgatattgccctgtgctttgaaaatgttatcacctaaagcagatggcatcagtgaaagaccaacgatggtgatgattgtgccaccgacgacttgggggactaagctgttaataattttttggaagaggccggtgacgccgagaagaattaacagaattgaaccgacaattgaagcgccaatcaccgttgccatcccgccgtctttagcaccactagcaaagtaaatcccggcgattgccccaattggaacaaatgaagggccttgggaaacaggcattttcataaaaaatttggtttgaagaatcgtaccaatcccggcagcaaggaatgtcgcttgaattaagccggcttttgcatcaagacccatcgccaataaaccggcaatgataacggggggaacgtagacatccattgctaaaacgtgttgtagtcctaagaagccagcttcttgattcgaaatcggctcgtcaggaccgaccattaatttttgagattgttcattcataccagttgtgctccttttcgtggaccagtttaccttgaacgtagacggccttaatttggtgtttggtgtggcggaataaaagttgttcgagttgttcatctggtgtaagacttgcaaagcgtggtggcgcttgaacgatttggaaatcagcaagcaatcccgattcaatggcaccagcttgaatgccaagactagttgcaccaccgacggttgccatataaaaagcttgtttagcactgatccgactgttcgcaacaccgcgttggtcagccgcaatggtggcgtcaaccccgtcttgtcgaatttgggaggccgttacggcttgttgcaaattggcatataagctaggggtataaccaccggcgatatcactgccaagcccaattttaatgccttgattaagtaactcgtgtgcggggagaatcccgttaccaaaataggcatttgagatagggcagtgcgcaatcgctgcttgttcggttttaatgatactttggtcagtagttgtcagttgtgttgcatgtgctaataccgaatgttgattcaataatccgaatgattgcaacatctcagagtctgtatggccgtaacgttcgcgtacataatcgtgttcccagtcgctttcgctgcagtgtgtctgaacggtgatgtgttgggactgtgcaagttgaccgagttgctgaagtgtttcagttgtgcaactagggatgaagcggggggtaatgacgggttgaatgaacccattacgataggtatcttgaattgcttgaacaaaagtttgtgttttattaatggcttcttcaggagaagcatcacgataatagtctggtgtttgatctggattatccatcgcaacagttccgatgaaagcccgttgccctgcttgggaacaaatttctgcgagtcgtagattcgcagaattgtgaattgttccgaaatatagggcggttgttgtgccgttagcgagcatttcggtcactaagtcttgatacacaggtgtggcgaaatctaaatcggcgtagcgcgcttcaagaggaaaggtataatgattgagccaatcagctaaagggcgatcaagggcaattccagcttgtggccattgtggcgcatgattgtgtagatcgataaagcctggtaacaagaagtgtccgggagcgagtgtgattaagtggtcatgttggcgcgcagctgataatcgctcagagtattctgacgccgtttgatgaataatgtttgtgatttgaccattatcactgatttctatcagtgaatattcgtgaaatgaactataatttggtgaatttgcagaaaaataacttgcttttagtgtgattggcaaacttttaaacctctccttctagatggtgtgttgtaagtatatcacataccataatgcttttaaactttaaaatcgttcgccttttgattcatttctaagggatgctttcagaaaacgacacgtgagcaaaaaggtaccctaaaaaatagcagactgctagaatgaacttaaataagctagttgaaaggatgaatcacatgagtttagcagatgaatttgtagaacggcgttttattgtctttcaatgctataagtgccaacatccagcgatggaaatcacgacgaagacagcactagaagataattcagatggctctaccaagtttcaaattgaaacaacttgcccacggtgtcaagcaaccgatcaatttgttatcaataacggtcaagaaggggaaattagcgcgagtgtcaatagtggcaaagtcgctaaggttgccaacattaaataaggcaatcgacgttcgctaaaagtgaacgtctttttttgtggcgtaaattgtatataattatgaatacatgaataaaaaggctggaaacggttgatttattcaaatataattgacattatgccctttgaattgtatatttattctacttaatacaattataaaggacttattgaaatggcgaaatcaaaaaaaattaacgttcaaggtctcgtattgatgatttttgggtcaatcttcggctttgcgaataccacaattgctttctacttaatgggctatgccagcattatttggtatatcttagcggcaattttctttttcttaccaacttcattaatgtttgctgaatttggttcttctttgaaagaatcacgcgggggcatctattcttggttagaagcatccattggtaaaaaggcggctttcatcgggacgttcatctggttagcgtcatggattgtctggatggtgtcaacagctgctaaagtgtgggtgccgttttcaacgttcctccaaggttcagatcaaacagcaacctggcatttattagggatgaatggcactcaagtggtcggtgtcttaggaattctttggattttattattaactttcctatcaagtcgtgggattgataagattcaaaagtttgcgtcattcagtgggatggccgttgcctttttattcgccgcattcttagtgattagtgtggcgatttggtttaaaacgggttttcatttggcagaaccgattcatgggacgacgacctttgttaagagtccgatgagtagctatcaaacaccaattgggatgttatcatttgttgtcttctcaatctttgcttacgcggggatggaagccatgggcggtgttaccgatagtatggatcagcctgaaaagactttccctaaagggttaatgattgcgacagtcttcattacattaatctacgcggttgcaatctttatgtggggcatctcaacgaactggcaacaagtcttgagcgggaataaagctaacatgggcaatattacttatgttcttatgcaaaacttgggttatcaattcggccatgcctttgggatgacgacacccgttgcgatgacgattggaacaacctttgctcggattaccggtttaatcatgtttatcagttacttaggcgcatttgccgtcttgatttattcaccattaaagtcatttgtactcgggacacctaaagcactctggccgaacggctttgcagaagttaacaagcatggcatgcctgaaaaagcaatgtgggcgcaagcattattagtctgcattttaatcgcggttatttcatttggtggtaaagctgccggtgacttctataatgtcttgactttgatgtctaacgtttcaacatcgttgccatacctctttttagtgactgcctttccatatttcaaggcacgcaaagatttggaacggccttacgaattctttaaatcaccagttgctgttaaggcggtgacgattgtggtcgacttagtccttgtcttcggaattgcctttacgattattcaaccgatgttagaaggtcaatatttagatgccttctggatggtcattggtccgattgtctttacgattatggcccttgctttgtatcatcgctatcaacgaaaagcagtacatggctaaattttttaaaagcgttgaccgatttggtcaacgctttttttgatggcctaattaagggcttgtgaattttaaaagggattaattctcatttaattttaatgtacaaaggaaaatagttgcattttcagattggttccgttttagaactaatctgatttttaaagactaacataaagccccatctagcgattttttaatttttaaagaaagttggttacctaactatcacattagaataaaatgagaataaaagtggacggtgtgcaactttcacaataaacctgtatactttttagatatagttttcagaaaatgaaatcaaagggggattctatgactgtcaaattacaagtcaaaaatctaacaaaaatatttggtaagcgcgtgccgcgtgccaaagaattactgaaacaaggaaaatcaaaagcagcgattctaaaggaaacaggtgcgacaatcggtgtcgaccgggctaacttcgaagtagaatctggcgagatttttgtcattatgggactatctgggagtggtaaatcaacattggttcggatgatcaaccggttgattgagcctactgaaggtagtgtattaatcgatggcgaggatttaatgcagattgataagaaggcattacgtgaagtccggcgtaaaaagatgagcatggtattccaaaattttgggctctttccaaatcgaacgattcttgaaaatacagactatgggcttgaaattcaaggcattgataaggcgacacgggaacaaaaagcgaatgaagcactcgatttagttggtttaaatggttatggcgatcagtatccgacacaattatctggtgggatgcaacaacgggttggtttagcgcgtgcattagcgaatgatgctgagattttattaatggacgaagctttttctgcgcttgatccattgaatcgttctgacatgcaagaccaactactcgacttgcaagaaacgatgcacaaaacaattatctttattagtcatgatttaaatgaagcgctcaaaatcggcgaccacatcatgatcatgaaggatggggaaatcgttcaaaccgggacaccggaagatatcttgacacggcctgctgacgagtatgtagagaaattcatcgaaaacgttgatcgtagtaaagtttacacggccggcaacgttatgattcgcccaacgactgttaatattgaaaaagatggccctcgtttggccttaaaacgaatgcgtgaaaatgaagtttctaatgcttacgttgtcaacagtaaacgtgagttagttgggattattgatgcgcgtgatgtacttgagttagtccgcaaagaaagtcgtgatttgcaatcaatcgtgaatactgaagttccaacaaccgatgaagagacaccaattgctgatatcttagatgatatttcgcaaacgggcattccgtttgctgtcttaaatgataagcaacaattacgtgggattattattcgcggggccgtcttaggggcacttgcaggaaacgaggtgaaccattttgcttaatttaatgacgattgctaaattaccaattgccaattggatggatcactttgtcgattggctgacacaatttactggcttttttaatggtttaacgaattttattggcggaattatcaacgctttccaatgggtgtttgatttaatccccatctggttattcatcgtgattatcgctggcgtcacttatttagcgaatcgcgacaccaaaaaatggggtttaattatctttgaagtcctcggcctactcttgatttggaaccttgatttctggcgggatatgacgcaaacgttaacgttagtgttaacctcgagtctgatttccctcgtaattggggtgccacttggaatttggatggccaaaagcgatattgcccaggcaatatttaaacccatcttagatttcatgcagacaatgccggcatttgtttacttaattccagccgttgccttctttggtatcgggatggtcccgggcgttttcgcatcagtgatttttgccatgccaccaacggttcgtatgacaaaccttgggattcgccaagtgccaaccgaattgatcgaagcctctgattcatatggctcaactgaatggcaaaagttaattaaggttcaattaccattggcgaaatcgaccttaatggctggggttaaccaaagtatgatgttggccttatcaatggtcgtgattgcgtcaatgattggagcaatgggcttaggaacacgagtttactttgctgttggccggaacgatgctgggggcggttttgcagccggcttggcaatcgtaatcttagcgattattattgatcgtttaacccaagctttgaaccggcaacgtaaacattaaggagggattcagtgattaagaagaataaattaatagcttttttcaccttagtggggctcgtcacacttctaacggcctgcagttcgcaaactaagccgtacgctaccgatgagaaattaggcggtcaaattaattacacgattaccggaattgacgcgggtgctgggattatggcatccacacaaactgcaattaacaagtatcatttgaatgatcagaactggcagttgcaaaccagctcaactgcggcaatgaccagtacgttagacaaagcgattgcggataaacgcccaatcgtcattactggttggcaaccacattggatgtttactaaatatccaatcaagtttttaaaagaccccaaaaatgtttttggtcaagctgaacacattaatacggttgttcgtaaggggctaaagaaggatatgccagaagcatataccatcttagatcgattccattggacgccaaaggaaatgtcgaccgtaatgcttaaagtcaatgacggtgttgaacctgaaaaggcggcgcgcgattggattcaagacaatccagaaaaagttgctgagtggactaagggtgttaaaaaggttcatggcacgaaaattaagttaacctatgtggcttgggattcagaaatcgcgtcaactaacgtggtggctgaagttttacgtcaacaaggttatcaaccaacgattcaagctatggaaattcaaccgatgtgggcgtcagtcgcaactaaagcagccgatgcacaagtttccgcatggttaccgaagacctctggtttatactacaaggattacaaaggtcagattgaagacttaggtccgaacttagagggtgctaaggtcggtttagctgtaccgaagtatatgacgaatattaattcgattgaagatttgaaaacaaaatagaatcaaacagcgtatgcgatctgttcagatagaacatggttagatgatcaaatttcggctgttgaaagagtcggttagggcaaaagttacttttgttccaaccgactctttttttatttgttagacattctctgttagaataggactattgaatgttatcggaggcggaatagatgtctgttaaggcgtttttagattttatcgaattacgcactaaagttggtagcgtgattccctttatggctgggttcttttttacgttgtattatttccaccaaattgatccgatcaataccgtgttgtacttctgtgcattggtgttaattgatgtcttcacaacgggatggaataattacaacgactttcacctcgctaaaaatgaaacgctccagcaatcaaccagtgcattaggacgacaagatattgcccctaaggttgctttacgctggttgatcggctttataagtacggcaaccgttctggggctgattctggtctggcgcacaaatttaattgtgttagccatcagtgttctgttcatcttaatcgggattttatatacttacggcccattcccaatttcacgattaccactgggtgagttgttatcgagtctggtattagggttcggtaatttctttttgacggtgtatgtcaacgttccggcggatcagttggtcgatttgcgctttgatgggccgttaatgttattccaactgaattggctgaatgtgattttggtgtttgtggcgagtttaccaactgtcttcctgattgctaatttgatgttaatgaacaatatttgtgattacacagtcgatttagagaatgggcggcacacattaatcagttacattggtcaaaagcgcggcattcaactttatcaacttagtgcgtatagttgttacgtggtgattattgttgggattggcctgaaattatatccatggccagcagcgctagcttttgcgagtggcccaactttgttacgtaatgggtttgcattacagaagagtcaggaaaaacgcgttgtatttggtacagcggttcagaatctaattgtctttaacggtttttggctagtgggaatgttgattggcctctatctttaaatgaaaagtcactgcggtggcttttttatttcaaaaaaagtattgattgtatatacaattttgattataccgtgattattaaaacgcttacatgtggagatgagagttatgacatatgcaatgattgggacttggcgaatggcctttgaagggattcaaaaagcgatggctgatttaaaaaatggtgggcaaagtacggatgcaattaaaaccgctatcaaaaaagtggaagattaccccttctttaaatcggtcagttacggtggtttgccaaatgcgcaaggcttagtggagatggatgcggcattcatggatggcaacacttttgcaattggtgctgttgcaggaattagtgatgtgaagaacccaatctcagttgcgcgtcaattaagtgacgatcattttaatagtttcttggttggtgcgggagcgtcacaatatgcgatgtttaacggttttgaaagccgtaatatgttgaccgaacgcgcacacaaaatctggatgcaacgaattaaagaaattaacgaaaaaaatcttagcccatatgatggtcacgatacagttggcatggttagtttggatcaagctgccggtatggcagcggggacgtcaacttctggattatttatgaaaaaaccagggcggactggtgattctgcattatctggcagtggcttttacgtggatagcgaaatcggtggcgcaaccgctactgggttaggcgaagatttaatgaagggctgtctttcatatgagattgtgcgcctgatggggaccggtttatcaccacaagcagcgtgtgatcaagcagtctatccgtttgttgagaaattaaaaaaacgctacggcaaagctggcgagttttcgttggttgccttaaataatcaaggtgaatggggcgtggcgacgaacgttgagtttacgtttgcagctggcaatcaagatgcggcaccacaaatttttatggctaatccagggccaagtcaaacgatggtgatcgaacccatttcagcagaatggcttgaagcctacgcgaaacggattaaagcaccagttgaatagaggaagtggttggaatggttaagtatctatacgttgaaattgcagaagccttacgagatgacattcaaaaaggggtctatgggatccatcagaaattaccatcggaaacggatttagccaatcaattttcaacgacgcggctaacaattcgcaaagcaatcgatctattggttaaacaacatgtcgtggtacgcgatcgaaatcgtggcacctatgtacttgcaacacaaagtaaaatttcgagtggttcatctggtttagttggttttaccgaagcagccaaacagtttcaattggatgtcagcacgcgggtgttagatttacgccggacaatcgtttatccggactatgtggcctccaagttagatttagcaccacaggagccagtttggcagattgaacgcttgcgaatggcagacggtgaagcgatgacccacgaacaaatctatctgaaacaaaaaattctaccagaattaacggcccatgaggcacaagggtcactctaccgcttgattgagcaaacaatcccaatcgggtatgccaatcaagaactcgaagcagtcgtattggaaaaaggcttaagtgacttacttgagacctctccagggcaacccgcttttctagcccacacggttgcgtattcaatggacggttatccaattctttatgataactcgcattatcgtgctgataaatacacgttccataacatcttgcaacgtgaacattaaaaggagggttttaaatgaaagtaattgtcttgttggatcaaatccaagctggattaggtggtaaggaaaaaggggatacccctttaggtggaaaaaaattagcgatgggtgctgcggatacgctcgataaggcattaaaaaaaatggactctgaaattatcgggaccttttattgcggaactgattattatcaggcgaacaaagccgaagtgaatcggaaagttgcgaagatgagtgagaaaatgggtgcagacgttgtgattgcgggaccgacctatgattatcgggacttttcgacgatggcgtgtgaattagcagccactattcaaaaagaaacaacaattccggttgttgggctgaccgcgatcgaaaagaatgccgatttaattcaacagtatcaaggtcaaataacgattgtgaagatgccaaaaaagggtggtactggtctttcggattcaatcgaccacgcattgcagttatgcaaaatgaaggttaaaggcgctgattttactgattttattaaccaatattgttattaaaaggaggcaaaaccgatgcaaaagaaactcgaacagattttgatgccggttgcgattaaactggggaataatgttgtactccgatcattgcgagatggtttcttaatcattacgccattgattatcgtgacatcgattttcttactgattgggaattttccaattcctggttggactgaattttggagtgggattttagggccgcactggacagaatggtttagtgctgtttctaatttagtgtttagttttacagggttgcttgcttgttttgggatatcctatgcctatggtaaaaaccgagggttacaagcgattcataccagtgcaattgctattatttcattcttaattttgacaccgactgttgtcaccgttggtaaaaaatcaatcggtgccattcaaacaatgtatttgggacctaacgggattttcctagggatttttatcgcattagtcagtgttgaaatttaccgttttgcgattaaacgcaactggcgaattaagatgccagatggtgtgccacctgcagttagtgaatcattcgatgccttactaccggctggcttagtggtattagttttcttcttaattcgaattggttttagcctttcgagtttcgaaacggcctacaatttcatctacacgttactgcaacaaccgttaaaaggtgccggcaactcattgccatctgtattgctttataacttcatcgcaatgttgctctggtgttttgggattaatggtccaactatcaccaacagtgtgtggtcaccaattttcttcgttctgacgcaagataacttaacagcattccagaatcatacgcagttaccacatattttcacccaacaatttattgacatcttcaccacatacggtggcggtgggagtaccccctcactcttaatcgtcatgttaatcgtctgcaagtcaaaacgcgtcaaagaattgggtaagttggcaattgtccccggtattttcgggattaacgaaccgattatcttcggtttgccagtcgttttaaacccaattattgcaattccattcattatcgtaccggttttaaatacattgatttcagggattgtattccaactcggatgggtaccgtatacaaatggcgttatgttgccatggacaacaccaccgattatttctgggtggctttcaactgggagttggacagggtcagtcctccaattatttgaattagtgcttggaattttaatttactatccatttatcatgatgattgatcggcagtatttggcggaagaagccgaagcggctggcttagacgatgttgatattaattttgacgaaatttaatagaaagaagccattcttgtgaaaccgattagagcagattttaaggcattatttgaagcacatgctgatgagttcttagcggacttgcgggaagtgttacgcgtgccgagtgtgtgtggagcgcaaacgtttgaagcgccgtttggaattggtccgaaacgcgcattggaaacagtgttggcgattgctgatcgaatgggctttaggacggggcaagtcggcaattgtgttggctgggcagaatatggaccagacgaaacgcaagcgccaacttattttgggattcttggtcatttagatgtcgtggatgttgaagatgattggcattatccaccatttgaactgactcaggtagataatatgctgtatgggcgtggtgttttggataataagggaccacttttatcgacattatttgccctgtatctgattaagacgcaaaagataacatttaaacaacgcgtccgaattatttttggcactgatgaggaatctgggagtcaggatatgccaatttatttggcggaacattccgcaccatatgccggattcacaccagattgtaaatttccagccgtctacggcgaacggggcttgttagatgtccagttagcgttaccgattacggacggctctgagcaacaaattacggcgattgaaggacggttcgctaaaagttatctgccagatcatgcacagctgattttggccgatggcacggttaaaacttatcacggcaaaaaggcacctagcaatgcccccgaaatggcggataatgtgttaccgaagttagttgccgatgcaagtcaactcactggtcaaacgggtcaattttatcaatgggtagccgctaaaatcgggacgcagtcaactggggaaaactttgggattaattatcaagatgaagcatcaggagcattgcaacttgctttttatggggtatcgattgaagcccaacagttaagtgtgcatctgacatgtcgttacccaatcccagtgacggaagatcagttgttaactgggattaaagctgccatgttgccggggatgacgttgacggttaaacggcgttatccatcgcaagttactgatccaacattgccatttattcaacaaccctctgcgatttatgcggcagatactggtttggatggcacaccggtcacaacaacgtgcgtgacttatgcgcgcgcgttaccgaacatcatcgcgtttggcccatcatttccaggtcaaaaagggattgcccataaaggggatgaatggcttcaattcagtgactggcaaatgatgatgcagatttattatgatagcttgctcgcagtcggtactggaacataaaaaagcgtgtgccataagtcgggataccctgaggattagccggaaggggatgacttataagaacacgtttagacgattaaagttctaatatcaaaaaaggggctgagacaaaatttacttttgtctcagccccttttactgtttagcgacttgctaatgcgcccattggatcccatggtgcgagaacggttgggtgatcgtattcttctgtttcaatgcgtttcatttcatccgttaagaagcgtttgttgatcacgatttgataaacaaattcgtcaaaccaactatcactcatgacgaagtaacctttcgtcccaactttgtcaccccatgagttttcaaccttccatttggttggttgaccatcgacgaggtcgacaccggtgatgaccatcgcatgggtcatgagactttcaccgtaatcaaggcgttcgcctttagaaattgaaagatccatgccgagcatggcatctttttgataaacttcagtgtccatgatgccgagtttgcgatcagatgattggcctacatcgctaccgaaccaaacggattcacctgcttgtagttgtttaatcgcgagttgtttgaaggtgtcgatgtcgaggtttaaatgccgcacttcacggccaccgaccacattgcccaacatttcaacgctgtataagtggttgtatggtttgtcggcagttggtgagttaatcaatgaaacgtaattttcgaggtcccagccaacgtatttttgatagaacgtttgcggtgtgaggcctttttcgatgtgatagttgtgatcatcatcgcggtattcaaagtcgaattcaacgggtggttcgcccaatgcataaacgagcatccggtaaacttcggttaacatcgcgtcttttttagcttggatgtcggcttcgctaacaccgtcggctactaattggcgtaatgtaacggcatctttacggagtttaaggttcaaaacgccgttgagttcgcttgatttttcactattatatgtttcgggcatgactgacttaggtacaatcccgtatttttcgatgagtgcgcagagcatgtcccattggccgccatcttgttggggcgttgtcattaagaagtcgactttgcggtcgccaattggttggctggcagtcttcaagacgttttcgtagaagtagtttgatttttcgaatttgtcccagaagttggtgtagttttgggacaattcgaaatccttaattttgaattggtcttggaggctgtggcgcattgtatttaacgcggcgaacatccagcaacgaccagattgcttttgattggaaacggcaccggtatctaagtcaattgaaaaaacgggggccattttggcttttgaatcggtattagcactcgtggctaaaaagccgttgttcataatggcatttttaattgtgttggattgtggtgttgccttgaaatcggctttgaattgttgaatatcttttgctgtaatgggttgaaccatgtggaaaacctcctctaaaatttggtgggttaaattaaattacccggtttgaatggcattatttttttgaaacgtgctttcatcaacaacttcttccgccttacctcacttgccaaatcggcgactgcattgccaattcgtcaagtgctgtaagtgctcagaagtaacccgttgatggcgcactctgatttgaaacgtgctccgtaagccatatccttccggttaaccctgaacgtcaaacgattgctggcgcaatccttcgccgttctgtgttaatcctcaggataaactcggcttactacgcactctattgcagtgcgtcccatgggtctagcttaattggggtttttgtgagtgcggcttgttcttcttttgtaaggtacgcttttttgacaattacctcgtaaacgtagtcgtcaaaccaagcgtcgctcatactgaagtaaccttttgtaccgactttggcactccatgtgttttcgactttccatttcgttggttggtcgtttacgaggtcgacaccggtgagggtcatcgcgtgggaaacaacgccttgtcggtagtcaagtcgttggtcttttggcatcgtcaaatcgaaaccaaagagtccagaatagtcgtaaaggttgcgatcaagccagcctttttgtcggtccatatccgcgagcacgtcattgccaaaccaaattgtttcaccgttttgtaaggattggatagccagtgcttttaaacgttcagggggtaagtttaagaggcgcattgggtgaccttcgactaccgtgttttgcgattctaaactgtagagttggttgtattgtttacttgtttgggggctgctgacaacggtgatgtagtcgtcaaagttgcgattgagatatttttgatagaaactttgcggggttaaaccgcggtcttcatggtaattttggtcgtcatcgcgataggtgaagtcaaacgtttcgactggttcgccgaatgcgtaaacacatagccgatagatttcacttaagaaaccagtccgcgtttcactgatggttgtttcgctagcgttgtcagcaacaagttgccgtaattgaatcgcatctttgcgcagtttcaaattaagagtgctgttgaattcagtggttaagtcactgttataagtttcgggcatgaccgacttgggcacagcaccgtatttttgaatcagtgccactgcgttgtcccattggccaccgtcaaaatcgggaccagcgagggtgaaggcgacttcgcgatccgtaatcggcttgtcggcagttgctaaaatcttttcataaaagaggttcgccttttcgatgcgatcccagaaagatagataattttgggagagttcgaaattcttaacgtgatatttctgttcgaaatcgtggcgtaatgtatttagagtggcaaataaccagcaccgcccactctttttttgaaagctgacatcaccagtggggaggtcgattgagtaggttggatcaagggtgacggcagcatcggggcgttgactaacggcgttaatgccattcgtcatcacagcatttttgagcgtcgttgcttgtggcacgccagctaaagcggtccgcatcttgattaaattattatgtgtaatttctttggtcatctaatcactccttaatttttgaattagtttaattctagttgattagatgggagatgtaaaccgaataacggggataaagctaaaagaatggtgattgataaatgtgaaagaaaacgatttatatgagagcacgggacacaaaaaaacgaaccgctgagggttcgtttggaaacgtgctttttaaagctgacgcttgcgcttagctacgtattgcaaacgaccgattttgtcggtcatttaaaacactgtgctagtgcacagtgtcaaatctcctttaaacgcacgctttattttgctgttaaaatcttcacgccatcaggtgcgccaaccacgacttggtcgacgatgtctaggaatagaccatgttcaacaacgccgacttgttcactgagccatgatgccagtaggtggggatgttggacttggttgaggtgtaaatcgatgacgtagtttttagaatcagttaagacgtgttggccgtctgcagtcatccggaattctggatttaagccttctttagccattttgttgaacacttgttggctgccaaatggaatcacttcaactggtagtgggaagcgaccgattgtatcgaccactttttcttgatcgacaatccaaatgttgcgggttgaagtagttgcgactaatttttcgaataagtgcgcagcaccgccgcctttaatcccttggaagttggcatcgacttcatcggcaccatcgatggttaaatcaatgtggtcgacatcgttgagtgctttgaccggaatcccaagtgatttggcttgttcttcagtacgaattgaggtgcagacacatgttaagttgaggtgttctgcttgtacccgttttgcgagggcttccaccatgtaaactactgttgaacctgttccgagtcctaaaatcatgttatcttcgacaaaatccactgagcgttcagctgccatctttttcattgcattcttatccatcaagacaccccttttgtattaataaatctattatacgaaaaaaacgctttaattgggcgctttttgttaaatttttaattaaatcagccttaggcattattcacagcctccgcggtttcatggtatgatacagtggtacaaaaagaacccaaatgggcgataatattaggagttttaggaatgaaaaaacgcggctttgaaattgtgaccaaataccaagaggcgggattgagtttaccggtgcgttcaacagcgcattcggcgggctacgactttgcttgtgcggaggacttcgtgttgccatcaatctggcattacaactttgtgcgtttgttccgaatgattcgaaatggcaaaccgttagtggatgacgattttgaacgtgcatcaaaaacgttgaaaccctttctagtaccgaccgggattaaggcttacatgcaagacgacgaatatttaatgatcgccaatcgttcaagtaacccactcaaaaaagggttaattttacccaacggcgtcggcattatcgatgcggattactacggcaatgatgccaacgaaggtgaaatttttatccaaatggttaacttcagtccgcgggatgttatcttgaaaaaaggtgaacgaattggacaaggcatcttcatgccatatttagtcgcagatgatgaagcgacggtaaccaccaaacgaacgggtgggtttggctcatctggtcgctaaacgttaatcgctaggtcgccgaaaattcacaaacttatgttaaaataaaactaatctcgataatgaaggagaatctttgtggctaaaattaagactcagtttgtttgccaaaattgtggctatagttccccgagattcttaggtcggtgcccgaattgtggcgcttggaaccaaatggtcgaagaacgtgaacaacctgcagctagcgcgaaatcaagttttacgatttcagggcgggcaactgaaccagaacaaattagcaccgttaatattcaaaaggaaccgcgtattaaaactgaattaaacgaactcaaccgcgtgcttggcggtggagtggtaccgggctcattgattctaattggtggggatcctgggattgggaaatcaacgttactcctacaagtttccggacaacttgaaaaggttggtaagattctttatgtttctggtgaagaaagtgcatcccagattaagatgcgggctaaccggcttgatgtgaatggcgatcaactttacttatatcctgaaacggatatgggcaatattcggcatcagattgaaacaatgaaacccgactttgtggtgattgattcaattcaaacgatgagcgaaccagaagtgacttccgcagtcggtagtgtttcacaagtgcgtcaagtcaccgctgaattgatgcgcattgcgaagacgaaccagattacgatttttgtggttgggcatgtcactaaagagggcgctattgccggtcctaagattttggagcacatggtagatactgtgttgtactttgaaggggatacgcatcatacttaccgcattcttcgctcggttaagaaccggtttggttcaaccaatgagattgggattttcgaaatgcgtgaagccggcttaaaagaagtcgcgaacccatccgagattttcctagaagaacgtttggcaggggcgacaggttcagccgtggttgtttcgatggaaggcacgcgacccatcttggtcgagttacagaccctaattaccccaacactattcgggaatgcaaagcgcacgtcttcagggttagatcataatcgagtctccttgattatggcggtgcttgaaaagcgtgctagtctcatgttatcgaaccaagatgcgtatttaaaagcaactggcggtgttaaattagatgaacctgcgattgatttggcgatggctgtttcgattgcatcaagctatcgggataaagaaattccaccaactgattgtttcgtcggtgaaatcggtctgactggtgaaattcgccgggtcaaccggattgaacaacgcgtcagtgaagctgctaaattaggctttaaacgtatttatgtaccaaagaataacttacaagggtgggacgcaccgacggatattcaagtgattggtgtgaccacgattgcagaaactttaaagaaagtattcaactaggcataagttggagcgagaggaggttgaacgatgcaacaaaaacgatttactaaaaaaagaatattaggaattgtgttcattatcttaggaggtgcgcttggaattacggcgttcccagtattttggccattagttcatttggaagacatgatgtatctcaataacggtattactaacgccattttaggggccattattttctatctattattcttggcgctggcaacaccaatgttgagagctatgcaccggcttgaaaaagccttaacgaaacaatcacctagttttattttatttgggagtgttttttcactaattggattgttattagcaaacgttgtttcgattccgctataccggatgcccatttttgcattaaatacagttgtacccattttattgatgattgctttagggtatctcggctttcgaattgggacaacgcgaatggaagaatggcgccgtttgatgcaacctaagaaacgcaatgctgatgtattagaacgtaaagtcggcgataatttccgtaagtataagattctagatacaagtgtgattattgacggccgaataaaagaaattgctaagacgggctttatcgaaggcacattgatggtgccaaactttgtcttacatgaactacaattaatttcagattccgctgataatttgaagcgggcacgtgggcgccgtggactggatatcttaaacgatattcaaaaagacgatagcttatctgttgaaatgtacgacggtgatttcgaggatttaacggaagtcgatagtaaactcgttaaattggcaaaattacttgatgggattgtcgtgacgaatgattataacttgaacaaggtctgtgaatttcaaaacgtaccggtcttcaatatcaatcaactcgccaatacgttgaagcctgcagttttacctggagaagcgatgaccgtgacggtggtgaaagccggaacagaacggcaacaaggggttgcctatcttgatgatggcacgatgatcgttgttgaagatggccaacattacttaaataaaccgctagaagtgattgtgacaagtgcgcttcaaaccgctgcggggcggatgatttttgctagaccagcgcatcaacaaaaaggcttgaaagaaaaatagccacgcagaacactttacacggtcgtcaataatctgtatcatggagaccaactaaaccgttaaaattgatgaagagaataagtagatgatgccaattgttaagagagctttcgaattgctggaagaaagccgattgccccatcgaaatgcacctctgaaatgccaagtgactttgtgacttagccgggacaccgttacctgttcaaggcatttttgcaaagaaaagtggaaccacgctcaatcggcgtcttttgttaaccaacaaaggacgctttttatttggaagagtgcgtttgaaacggtttgacttcgagcatttgcctaataccgtgagggagcgccaccggcgatcgtttgcggtatggagcaaagcacagaagtcagtttcaaaaagcacgtttagaagaagagtgcgacagcaggtggttatattttgagcattaactggatttgacgaattggcgatgcaatcgccgattgggcaaatttggttaagcgcagaaataagcctgcaagagcacgtttaagaaaggaagattcgatgttaaccgtttataataccctcacgcgtcaaaaagaagtcttcaaaccgattcaagcagaccgcgttaaaatgtatgtctgtggaccaactgtgtataactatattcatattggtaatgcgcgcagtgcgattgcctttgatacgattcgccgctatctcgaataccgtggctatcaagtcgattatgtctcaaattttaccgatgttgacgacaagatgattaaggctgcgaatgcggaacaaatcacggttccggaattagctgaacgctatatcaccgcttttaaagaagacacccaagcacttaatattgaaacagcgacactcaatccgcgggcgacagaaaacattccagaaattatcgcgttcattcaagacttaattgctaaagattatgcctatgccgttgatggcgatgtttactatcgtgctcgtaaatttaaggactatggccatctagctggtcaagatatcgatcagctcgaacaaggggccagcgaacatacagcaaccgaagaaaccctacgtaaggaagatccaatcgactttgccctttggaagtcagaaaaagggaccgatattgcttgggattcaccttggggtaaggggcgaccaggctggcatatcgaatgttcagtcatgtcgaccaaatatttaggcgacacgattgatattcatggcggtggccaagatttagagttcccacatcatgaaaatgaaattgctcaaagtgaagcgaagactggtaaacatttcgtcaactattggttgcacaatggctttgtgacagtcggggatgatgatcaaaaaatgagtaagtctcttggcaacttcgtgacggtgcatgatttgattcaagaagttaatccacaagcattacgtttcttgatgagtagcacgcaatatcgccgaccaattcgctacagtgaatcattattagctgaagcgcaaacgaacctggatcgtttaaaaacgaccctcgataacttagcgttccgccaaacgactgctgaagcgggtgcagacgcagacattgccgcacaagcggcaagcttggaagacgcctttgtgacagcgatggatgatgattttaacgtgcaaaacgggttaacagaattgtatgaactcgctaagcttagtaatcaatacctggaacgggctaccgtccaagctggtacgttagtggatttaactacccgtctaacgcgcttgttagccatttttggtgttgagtttaaggcggcccaactgttggacgcagaggtcgaaagcttgattgaagaacgcaaagatgcacgggcagcaaaggattttgcccgcagcgatgcgattcgcgatcaattgaaagaacaagggattattttggaagatacaccacaaggaatgagatggagacgcgcatgaaaaatgctttacaactaaacgggattgcgttggcatatatgggcgattcagcctacgaagtgtatgtccgcgcccatttgctagaactcggtttaaccaaaccaacgcgcttgcaacaagtggcgacacattatgtgtcggctaaagcgcaagctgctttgattggtttgatgatcgatgataattatttaacagaagaagaaatgaatatttttaaacgcggtagaaatgccaaaagttatacgaaagccaagaatacgagtgtttcgacttatcggacctcaacgggctttgaagcagtttttggctatctatacttaactgaacaacaagagcgcgtcgctgaattagcccactggtgtattcaacaagtcgacgctgggaggacccatgagaaaaaataataaccaaccattcaaacaaaagaacaacgaattcaatagtcgtcggacggccaataattcggcaaagccaacgcgccgtccagctaacaagaaaccagcagcacccgtcgaagaagcagttgttgaagaacaaactgatttcgtcatcggaaaacacgcttctttagaaacattgaagaccagtgatgcgaagaaaatcaataaaattttcttacaagatggcttgaaggctgactttgtccacgatgttgtgaaattagcgaaagaaaaacgtctaatcattcaaaatgtgcctaaaaataagttggacttattgagtgaccgtcaaaatcaccaagggattatcttagcaatcgcaccgtttgaatatgcgagtgttgatgatattttcgctaaggccaaagcccgagaagaagaaccgtttatcttaatcttggataacttggaagatccccacaacttgggttcaatcatgcggacagctgatgcggttggtgtgcatgggattattattcctaagcatcgtgcggtggggttaacatcaacagttgctaagacatcgactggtgcgatcgaacatatcctagtggcgcgtgtcacgaacttaacacaagaaattaagaaattgaaggaccgtggtctttggatttttggcaccgatatggctggtaccgactatcgtaagtgggatgctaaaggaccaatcggcttaatcattggtaatgaaggcaaggggctttcaccaattgttaaaaaagaagttgatcaaacgttgacgattccaatggtcggtcatgtgcaaagtttaaatgcgagtgtcgctgcgggggttttaatgtatcaggcttataatagccgtcaacctttggtatagcagatgaaaaaacagatcttaattgcagatggttataatatcattgggaactggcccgagctgaataagttgaaacaaaatgatcatctcgcggatgcgcgtgatcgcttattgcagatattatcagaatatcgcaagtttcgtgagattgaagtcatcttagtatttgatgcaatgtatgtgccagggattaaacaaagttatgtgcagtataatttggaagttgtcttcaccgatgaggatgaaacagcggacagttatatcgaaggcttagcgggtaaattaatgtcgccgattacgcaagtgacggtggtttcgagtgatcaagctgagcagtggacgattttttcacggggcgcattgcgggtgtcttcgcacgatttttatcgtgagattcgccgaacgcaccgtgaaattgaccatgatgccaagcattatcatgatcggaccttgcaacggaatatgccgtggaatccggcgcaactagatcaacttgcacaggtgcgagatgcactaagtgctgaaaaagatgattaaacaaacgttctcttaataaatgtacgataacttgttaagataaaggcgtggggttgcgtgagaggtggttcattgatggaattagcaaaacgtgatgcaaacttaattcaagcggtggttgaaaacgattctgaggcgttggatgttttatttaaagcctacctaccaatggtttatcgcacctttactccatattatattcgcttatttgatgaggacgattggttacaagaagcgcgaatcgtctgttatgagacttgccagtgttatgatcaaaattgcggcaaaagttttggtggtttttataaattacgctttcaccaccacgtattaaacttgattcgcaaagaacttgctcagaaacgacgggtcgatcagcaagccctgttatttgattgttgtccggaatgcaatgcgctcgctgaagataccgtggcatactatcagtcaacggttgaaatgcgggcgtacttagagacactatctgctttagagttagtggcctttcgggttttgacggggcaactagcagttgagcaagcgtgtagccagctagattgcacgtttgaacagatgaaacgggcacaatcgcgttgccagacaaaattaaaacgattctatactaaacaataaaatagctaaaagctgctaaccgacgatttttaggcattggttagcagttttttgtgtttagtagggagcataaaaaatacttttcatgcgataaaataacaggtgacaggttaatgattgggataggtcaacaaaatgggcggcttatatatttttaaataacattaattgacattaataaagaaagcgcttatactaaaaacatagaggaaatgaaaacgctttttataagccttttatcgctttctaaccaattaaaatttaaggggtaattcattatggcagaaaaaacaatcatgttatgttgtgcagcagggatgtcaacaagtttattagtttcaaagatgcaaaaggccgctgaagcacaaggtttagacgcagaaatttttgcaactggcgcttcagatgcagacaaccaactcgaatctaaaaaaattgactgcgtactattaggccctcaagttcgtttcatggaaggtcaatttaaagaaaaattggcaccaaaaggaatcggtgttgaagtaattgatatgaaggcttacggcatgatggacggcgaaactgtcttgaaacaagcgttagcattaatcggttaaaaaaagattaagaaaagcggtagcgacctatttttaggcggctaccgctttttttgtttatgaatcaggtataattaaggtaatcaagtataaaggagtttattcaatgagtttaattggtacattaatttggtggctattcgggggattagtagaggctatcggttggtttattctggggattgcctggagtattacgattattggaattccagtcgggctacaatgttttaagattggcgcattgaccttgatgccgtttaacgcaaccgttgtttcaacggggggtgcaggttcgtttttattaaacattgtttggtttttcttaggtggtcttgtgatgtgggcgagccatgtcttttgggggctattattatcaattacgattattgggattccatttggccggcaacactttaagctagcggcgttatcgttaagtccgttcggcaaacaaattaattaaaatgcaaaagggcaacgatattgatcgctacccttttttatgtggtgcaggcatatttctgtgcttagctacacaagtcaaacgattgcttgtagcaagcattcgccttgttaggctgatgctcgcagcataaccggcttttgacgcactctattgtgttagttcttctagtgccatcgcttgttcttcccagtctgattctgtttgagcgagttcagcttggactttttctaggtcttgttgtagttcttgaagcatgaggggtttagtaattacgtctgcttgggtcatttgttcttggattgcgttggccttagtctctagtgcggccattttttcttctaaagcagtaacttcgcgttctagtttccgttgtgcacgttggttttccttacttgctttgtaggcatctagtgcattggcacttggttggataattgcactgttttggctagctgcttctgcgtaagctgtttcttcagctttcttggcgaggtagtaatcgtaatcaccgaggtatcgtttgctaccagtatctgatagttcgataatgccagtggcgacttgattgatgaaataccggtcatgggaaatgaagaggacggtgccatcgaattcacggagggctttttccaagacttccttgctatcaatgtccaaatggttcgttggttcatccatgattaagaaattgtcatggttcatcgcgagtttcgtcaagagtaagcgggctttttcaccaccactgagttgtgacacaacctttaaaacatcgtcaccggtgaataagaaactaccaagtagtgtgcgaatttccttttcaggtgttgtatggtgttcatcccataattcgttgaggacggttttgttagtgtgtaaattgcgttgctcttgatcgtagtagcccattgaaacgttactaccgactttttcatggcctttgatgaacggaatttggtgcaagatacttttgagaagggtcgatttaccaattccgttaggtccgatgatggctaagcgttcgtggcggttcacttcaaaattgattggttgtaccatgattttatcgggggaatagccgacagcggcatcgcttacttgcaatacttcgttaccgcttggatgttcgctttcgaaatgaaaatgaattttaccggcttcgttttgcggccggtctaatttatccatcttttcgagttgacggcggcgactttgggcttgtttcgtggtacttgcgcgcactaagtttttatcaacaaaggtctgaagtttatcgatttcagcttgttgtttttcataagccttccattcgagtgagaggttagcttcttttaaacttaagaaatggctgtaattaccggtataatgggtcaatgtgtggcgactcatgtcgtagacttctttagtgattttatctaagaagtaccggtcatgtgagacggtgagcaaggcaccgggataagtttgtaaataattttccaaccatgttagtgtttcgatatctaaatggttcgttggttcgtccaaaataaggacgtcttttttctcaagcaataacttagcaagtgcgagtcgcgagcgttcgcctcccgatagtgtactgattggcttttcaaaggtgtcttctggaaattggaaaccatgtaagacgccacggatttcggcttcatagccgtaaccattagcttcagagaaatcgtgttggacttggtcatatcgttttagtaaggctgcatattcttcgctagcatggtcaatggttgtgtccgcaattgcggtctcgagttcatgcatttgggcttccatttggcggagatcatcgaaaatggttaacatctccgcatagattgtccgggttgagtctaagccactatcttgcgctaagtaaccgacttgagcatttttgctaagaatgatttggccttcatcaggcgttgtgatgccggcaatcatttttaataaggttgatttaccagccccgtttggaccaacgagggcaacacgggcgcggtcttgtacttcgagttgtgcgtttttgaaaaggtaatcgccgccaaaactgcgtgcgacttgttgaacttgtaataatatcacggctaaaaatcctttcgtgcggtgttttttaaagttaattgcgttcatttttataatactactgtcaactatcataacagatttaaacgatggacagtcaaaattgtaaatatattgcttttcacaagaaaattcagtatgatttcagtatggtactacactattttcacaagcaaatcaaaaaggaggtttcaaatggttgagaataatatcccaagagcaactgcaaaacgattgcctttatattaccgctatttaaactttttgaacaattcagggaaaactaaaatttcctctactggattatctgaagcagttaaagtagatagtgcgacaattcgtcgtgatttttcatatttcggtgcactgggcaaacgtggttatggctatgatgtcgcttcgttgctagattttttcaagaagaccttgaaccaagatcgattgacaaacgttgcattgattggggtggggaatttaggccacgccttattgaactacaactttaagcaaaccaataatattcggattagcgcagcatttgatgttaaacccgaaatgattggaacaattcaaaccggtgttcctgtctattcaatggacgagatggccgaacaattgaagaaccaacagatcgagattgtcattttaacagtgccaattgatgaagctcaagaagtcaccgatgaattagtggccgctgggattaaagggattatgaactttacgccaattcgaatttctgtgccatcaaacgtgcggattcaaaatgttgatttggctaaagaactacaaactttgatttacttcctcgataattatactgatgaacaaaatcaagaataaaaatagcgtttaaacaagttgctcgtagtagccgcctgtttgaacgctttttttaacgattgagatacagtaaagtgacgatcaggttcatcccagcatggctgatgattgtggtgaaaatcgaacctgtcttgcggtacagccaacataggaaaagaccgatggccgtgtagattaacaaatgcccgtcctgatgtaaaaaagcaaacagtaaacttgaaatgatggcggctaaaatgcggtttaagcgactggctaatccaccaaagattgctttgcgaaacgtgatttcttccataatcggtgcggcgatggtcgttgctaaaataagaaacggttgttgttgcatcatggtcatcagtgaaatggtgttgagcgatttggcagtgatgtggagaatgttttgttcaatgaagccggcgagaatctgaattactaagaccagtacaatgccacacaacccccaaatgataatgggtttgagtgggaaaggccgctgctcaatggcattggcttgtgtgcgttgattaagatagagtaaccaggcggcaccgaggcaatcaacaatggttgtgattagaaaaaacgaggcagatagatgaccaaaacggacgactgcactaggaatcaataaaatgaacaaatagctaatgataattgaaaaattttgtttgtatagcgtcatgtgaaagctcctcaaaggttgttgtgacaatagcttagcgtattagcattcaaattgcaaaagtgctagcataatacttgcaatgttctgaaaaaatgctatgataaaaattgtgattagcacttgagatgatagagtgctaaaaaagtaaaattgatggagggattttaagtgttaaaaccattagaagatcgcgtgattatcgccgttaaagacgaagaagaacaaacagtaggtgggattgttttggcaagtaatgctaaacaaaaaccacaaaccggcaaagtagtcgcagttggtaccggcacattaacaagtgacggcaaacgaattccacttgatattaaagaaaacgatgaagttatttacgataaatatgcaggttcagaagttgaatatgaaggtcaacaatatttagtgctccatgctaaagatattatggctattgttgaataataataaacaaaaaaattttttgaggtgaataaattatggcaaaagaacttaaattttcagaagacgcacgttcaaaaatgttggcaggggttgaccaattagccaacacagtgaaaacaacattaggaccaaaaggccggaacgttgttttggaaaaagcttacggttcaccagaaattactaatgatggtgtgacaattgctaaagcaatcgaattagaagatcattttgaaaatatgggtgctaagttagtttctgaagtggcttcaaaaacgaatgacatcgctggtgatgggacaactactgctactgttttagctcaagcaattattcgtgaagggatgaagaacgtcacagccggcgctaacccagttgggattcgtcgtgggattgaattagcaactaaagaagctgttaagaagttacacgaaatttcacacaaagtcgaaagtaaagatgccattgcccaagtggctgctgtttcatcagctaacgaagaaactggtcgtttaattgctgatgcaatggaaaaagttggcaacgatggggtcatcacagttgaagaatcaaaagggattgatactgaattaagcgttgttgaagggatgcaattcgaccgtggttacttgtcacaatacatggtaacggataacgataagatggaagctgacctagataacccgtatatcttaattacagataaaaagatttcaaatattcaagatgttttaccacttttacaatcaatcgtgcaagaaggtaaagccttgttaatcatcgctgatgatgttgatggcgaagcattaccaacacttgtcttgaacaagattcgtgggacattcaacgtggttgctgtaaaagcccctggttttggtgatcgtcgtaaggaacaattagaagatatcgccacattaacaggtgccacagtgattacaagtgacctcggtctagaattgaaagaaacaactatcgatcaattagggacagctggtaaggtaactgttacaaaagatgatacaacaatcgttgaaggtgctggtagcaaagatgccatcgctgaacgggttgaaaacatcaagaaacaaattgctgaaacaacatcagactttgaccgtgaaaaattacaagaacgcttggctaaattagctggtggcgttgcagtgattaaagtcggtgctgccacagaaacagaattgaaagaacaaaaatatcggattgaagatgctttgaacgcaacgcgtgcagctgttgaagaaggctacgttgccggcggtgggacagcattaatcgatgtgatcgaaagtgttgctgcgcttaaagaagaaggcgacgttcaaaccgggattaacattgtgcttcgtgcattggaagaacctgttcgtcaaatcgcaaccaacgctggtcttgaaggctcagtaattgttgaaaaagttaaatcacaaccagttgaagtcggctacaatgcagccaacggcaactgggaaaatatgattgaagccggcatcttagatccaactaaggtgacacgttcagcattacaaaatgcagctagtgtggcggccttaatgttaacaactgaagcagtggttgctgacaaaccagaagacaacccagcaccagcagcaggcatggacccatcagcaatgggcggtatgatgtaaagaagtgcgtttgaaacgggttggttctgagcattaacctaaaaacgagcgttatggcggtttttgccataacgctcgttttgtagttaagcggaaggcgttataaccaaaaagcacgattaaatccaaagttccaaaactggcaaaagttttggaacttttttatttttcaaaaaaaatgcgcatatataaattgtgcgcaaccctattaattaatttgattgcggtataataatagttggaggtgttgacaatgatttttcgaaaccggcggatactgataacctgtttaatgttaggtggcttctttttagcgcgaccacaaatggtccaagcaacgcctgaagaaacgcaaactgccattaagacagcacaagatcatctatccgaattgaataataatattagtaatttaacgttaaaaacaacgcaattgaacgaacaaatgactgcaaaacaggcggatattaaagaaaaacaagacgagttcagcaaaacatctgctgattatcaaaagcaagtggcgactattgaaggtaacctgcggcaattacaaacacgagatagcagttttaatcttgatatgatcgatagtttattgtcgagccaaagtttgagcgatttattccaaaaaggttcaatcatcaatcgactgttagacgctaaggcggataatgccgctgaaacggcctcattagctgaaaaaaagctgaacaaaagactgaattagaagcgcaacaggccaagctggtatcattatcacaggaaaatgatgccgcaattaaggacttagatcaacaaaaacaacaagctaacgaccaattaacgcaactacaaacgaagttcaagaaagaattagaggcgcaagcggctgctcaaaaagcggcgagtgatgcaggtgccgcattaattactggtaacaaggatttaatgaataataagattatccaagaagcggttaaatatttaggcgaccctatgtttggggtggcaccacacccgaaggatttgactgttctggcttagtgcaatacgtttacgctaaaaatgggattaaattaccccgtgtttcacaagatcaaagtaagttaggcaaagatgtaccgctcaatgaattacaaccaaacgacctattattctggggaggggttggaacagcccaccatgtcgcaatctacattggggatggctactttatccaagcaccacaacctggcgataaagttcgaattactaaaatttcagattacaaaccagattttgcccgtcgtttatcataaaaaataagaactgaccaaggaatcgaggcgtttcgattaccttggtcagttcttttttaaattgtggtagtaattcatgcgtaactatagtagaatacgatttgtttgaataaacggcaattatttttttaagttatagagaaattcaaaagtcactgtgtggattgcgacgaatgatattcacatgagggctttttatgttagaaatattatttaaaggggtcatattgctatgcaacagttaaaacggatttttatcgggaaaccgttaaaatcttccgatgagggtaatcaaaaattaggacgctttaaagcgttagcgatgctatcttctgatgcattgtcatcagtggcctacgggacagaagaaatcgtcatcgtattgacgaccctttcggccgcggcaatttggtattcaattccaatcgcagcctttgtgctcgtattgctattgtcattaactttgtcatatcgccaagtgatccacgcctatccaggtggtggtggcgcctacgttgtttccagtgaaaatttggggaaaaatgctggtttagtggcaggtggttcactgcttgtggattacatgttaaccgttgcggttagtatttccgcgggtgcggaagcgatcacctcggccattccggcattgtatgggcatcaagtagggatttccttcattatcgttttgatcttgatgggaatgaatctacgtgggatgcgtgaatcagcatcatttttaatggtgcccgtttacttattcgtcttgatgatgactttaatgatcatcgttgggtgttataagatcttcacaggtgcgattccgttccacgcaacatcaaccgttggggctgttgtaccaggtgtttcgatggcgttgatttttagagccttctcatcaggttcatcatcattaactggggttgaagccatcagtaatgcggtaccatttttcaagaagccacgtgcaacaaacgcggctgaaacattagcaatcatggcagccatcttaggtttcttctttgctgggattacatttttaaactactggtacggcattgtaccagcagaaaaagtaactgttctatcacaagtggcccaacacacctttgggaaaggctttttattctatattgtgcaatttgcaacggcctttattttagccgtcgctgcgaatactggattctccgcttttccagtgttagcgtataatttagccaaagacaaatatatgccacacatgtacatggatcgtggcgatcgtttaggttattcaaacgggattattacattggcgattggttcaatggcattgattttcatctttaacggggatacatcacgcttgattccactttatgcggttggtgtgttcattccatttacgctttctcaatctgggatgttgcgcaagtggtgggtcgaacgaccaaagaattggtttggtaaatcaattgccaattttgttggcgctttgatttcgtttgccatcttagtcattctcttcgtttatcgcttacctgatatctggccattcttcatcatcatgcctgttatgatttggattttctataagattcatgatcattacaagaaagtggcgcttcaactacgcgtgagtgctaaagaagccgtcttgcatgattatgacggttcaactgtgattgtcttggtcagcaacgtgacccaagtaacccgtggtgcgctagattacgcacaatcaatcggggattatgtgattgcgatgcatgtctcaacggatgaaaatccagccaaggaacgtgaaattcaagctgaattcaaggaagattttccgaatgtccggttcgtcgatgtccattcatcataccggtcaattcaaaaaccaattgttcgctttgttgacattgttagcaagaatgcgcaaaaacggaactttacaaccacggtcttggtcccacaattcgtaccaagaaaaccatggcaaaacattttgcataaccaatcaagtctaagactaagaacggcatttgcaaaccgcgaaaacattattatttcaacatatagttatcacttaaaacactagaagtgcgactcgatctgagtaggctttgaggattaacagtaaaatgggcattgtggcggttcttgccatgatgctcattttgcagttaaccggaaaagactgatcgaggagcgcgttaaagaaagaagtgcgtttagcaaccgagcattaatacaaaattggcagttatcccgagttgtgggatgactgccaattttagattaagcggaagttggtgcaactaaaagcacgttagaagagaagtgtgtttgaaacggtttgactttgagcattagcctaaatctgtgaatgagcgacggagttgatcgtttgcggattgtagctaagcgcaagagtcagtttcaaaaagcacgttaaaagaagaagtgtgttcaaaccgattatgttctgagaattagcaaaattagacgaataagcgacgaagtcgattggttggctaattaggctaaacgcaggaacatggtttgaaaagcacattatcagccccgctcaccttttcggtgcgcggggctttttttgtttttctacgggtacagcaaaactttttattctgggcaaaaattgctacaatagaagctatatcaaagtctgagaaagaacattaaggggcgcaacatgcgaattttatttattggtgatacagtgggcacaatgggtcaaaaaatgatcaatgattacctaccagcattaaagcaacaatacaaaccacaggtgaccattatcaacggcgaaaacatcgcggatggtaaggggatgactcaaaaggattataagaatcttttacaagctggggccgatgcgattacgatgggcaatcatacttggaataagcgcgatattttagaattcatcgacgatgctaaaaaattagtgcggccggccaattttccgaaaggaacgcctgggcaagggatgacaatgattaacgtcaatcaagccaaattagccgtgattaacttacaagggcgcgccttgatgaatgaactactaattgatccgtttgaaatgttagatgaaatggtggctgaaattagtaaagaaaccaactgtatcttcgttgattttcatgccgaaacgacgagtgaaaaactcgcacttgcttggtatcttgatggccggatttcagcgttagttgggacccatacacatgtgcaaacaaacgatgcgcgcgtcttacctgaaggcacagccgttttaacggatgctgggatgactggcccttataacgggattctaggcgtgaagcgcgaaaagatcattaatcggtttaaaacacaacggccagaacggtttgaattagtgaccgaaggaccgggtcaattgaatggctgtttaattgaaattgatgacaaaacgggtcacgctaaatcaattaaaccgatccagatttcaccagatcacccctatacgcaattttaagcaccttagcagcagatcaacgtcaatgagagagggattaacaacatgccacaaaaaacgaaagaaacgccaatgatggcgcaatatcaaaaggtcaaggatcagtatccggacgcttttttattttatcgcctcggtgatttttacgaactctttaatgatgatgctgtcaaagcttcacaattattggaactcacactaacagcacgcaataaaaatgcggatgatccaattccaatgtgtggggtaccacaccacgcagcccaaaattacatcgatattctagtcgatcaaggttacaaggttgctatttgtgaacaaatggaagatcctaaaaccgctaaagggatggtcaatcgggaagtcattcaactggtcacaccaggaacgatgatggatgaaaaagccggccatgccaaacaaaataattacttaacagcagtggtggcagatggcgatcagtttggctttgcttataccgatttatcaactggtgagatgaaagtcagccagattgcgagtttggatttattgctcaacgaaatgttgagtttacaaaccaaagaagttgtcattaaccacggtgttaccagtgaggttgtgcacgcgtttgttcaacaacaaattctcgtgtcgtatcaagaagatggcgatgcaacggccgaagtcagtttcgtttcacaaaacatctcccagccccttgaactggccgtgattaaacaattggtcttgtatttggcaacgacgcaaaagcgccatttagggcatttacaacgggcccaagagtacgagccatcccaatatttaaaattagaccattctgcgaagatgaaccttgaattaacggcttctttacgcactggtcataagagcgggacattattgtggttattggatgaaaccaagacggcaatgggtggccggttattaaaacaatggttagaacggccattattggatttaaaggcgattcaaaaccggcaacgccaagtcgctagtttcatgaaccattattttgaacggacaaacttgcaagacgccctcacaaaagtgtatgacctagaacggctagcaggtcgggtcgcatttggcagtgttaatggccgcgatttaattcagttgaagacttccttggaacaaattccaacgattaaaacgattttaacgggcattaatgacgatcagacctttgaccgtgcgttagaccaactcgatccggttgatgatgtacgcgagctcattgaaacggccatcaatcccgatgcgccaatttcagtgactgacggtgggattattcaatcgggttacaacgaaacattagatgattatcgcgatgcgatgtctaacgggaaacaatggctagcacaacttgaagctaaagaacgcgaaattaccgggattcataatttaaaaattggctttaatcgcgtgtttggttactatatcgaagtgacacgtgcgaatttagacgcgctacctgaagggcgttatgaacggaaacaaaccttaaccaacgccgaacggttcattacaccggaattaaaggcgaaagaacaattgattttagaagccgaagaacgctcaaccgcgcttgaatatgagttattcacgcaagttcgcgaaaccgttaagttggagattgaacggcttcaaaccctcgctaaaagtgtggcggcccttgatgtcttacaaagttttgccgtagtcagtgaaaactaccactacgttcagccgacattaatgactgatagtcgcgaaattgatttagtggatgggcgtcatccagtggttgaaaaagtgctcggtcgccaaaaatacattcccaacgcggttcaaatgggcaccgatacggatatgctcttaattactggtccgaatatgtctgggaagagtacgtacatgcggcaactggctttgacggtcatcatggcgcagatgggatgttttgtaccggctaaatctgcgaacttaccgatttttgatcagatctttacgcgcattggtgcggccgatgatttaatttccggtcaaagtaccttcatggtcgaaatgatggaagccaatcgcgcgattatgaacgcgacacaaaatagcttgattctctttgacgaaatcggacgcggaacagccacctatgatggaatggccttggcccaagcgattattgaatacattcacgacaacgtgcatgccaagatactcttttcaacgcattatcacgaattgaccagcttagcggattcactaaccgcattgaaaaacgtccacgtcggggcagttgaagaaaatggcgagttagtctttttacacaagatgctggctggcccagctgataagtcatacgggattcacgtggctaaattagcggggatgccgacaccgttgttgaaccgcgcagatgtcatcttggatcaattagaagataaaccaaaggcagctgtcgcgccggctgctgaaccggttgaagaagtggatgaacaaatttcactattcgaaccagaagtggcaccacaagcggatccaaaagcagctaaagtcctagcggcggttaaacaattcgacttaatgagcgccacaccactagacgcgctaaacatgctatacaaatggcaaaaggaattaaacaaataagagtgcgtcatcaacgggtaacttctgagcatttacagcacttgacgaattggcgatgtaatcgccgatttggcaagtggggtaaagcggaagaagttgttgatgaaagcacgtttcggataagagtgtattcaagcttgtccaacttttgagcattagcacagggaagcgaattagcgacgcagtcgatgatttgattcacagcgctaagcgcagaaagttagcttgaaaagcacgttttagcactaaatacccacacgtcagaaaaaggagaacgctaatggggaaaattcatgaactgtcagaaatattaagtaaccaaattgcggcgggcgaagtaattgagcggccagcttcagttgtcaaagagttggcagaaaatgcgattgacgccaatagtactcaaattgacatcgtgattgaacaggctggtttgcaattgattcaagtcatcgataacggcgatgggattgaaccggaagatgtacccactgcatttaagcgacacgcgacaagtaagattgccacgcgccaggatcttttcaaaattcagtcacttggctttcggggtgaagcgttagccagtatcgcgtcagtgtccgatttgacgattgaaacggcaaccgctgattcgttagggacatttgctcattttaaaggtggcgtcttagaagaacagaaaactaatccaattcgccctgggacggcaatcacggttcgtgatttattcttcaacacgccagcccgcttgaaatatgtgaagacgttccagactgaattggcaaacgtgatcgatatcgtcaatcgcttggcgatgagtcatcctcagattgcgttcacgttaaccaatgatgatcacctgctgttaaaaacggcgggtaataacgatttacaacagacgattgccgggatctatggcgttacaatggctaagcaactcttgccagtcagtgcagaagatctcgattttaaattaaccggctatgtatcgctaccgaaactaacgcgggccagtcgtaattacatttcagtgttgattaatggtcgttatatcaagaattatcaattgaataaggcgattatcaagggttacggttcaaaattaatggtcggccgttatccagtcgtcgttttaaatattcaaatggatccactgttaatcgatgtcaatgtccatccgaccaagcaagaagtccgcttgagtaaggaacctgctttgatggcgttgattgaaaaagcaattcgtgagcgactcagcaccgagaatttaattcccggtgcagtgcagaatctaaaacaaacgaaaccggtcgatgtggaccagcttcaaatggatttaaaccaaattacgagtcaacggcgcaatgcgactggtacggtgcggccaattcagccccaaacagttcctgaaaagccggttaaaactgaaatgcaagcggcagcgcaaattgcggaaaccgaaacaccccttaaacgagaaccaactgctaatcctaatttaaatagcctgccgatatttgaacaaccccaacaattggcccggtgggatgataagtacgaagcagaggcgatcggaaatccgtttggtgaacaacctgaagatgatgcagcacccattgagcgtttcccagcgttacgctatattggacaactgcacaatacattcttattagcagaaggtgaagatggcttttacatcttagatcaacatgctgctcaagaacggattaagtatgaatactatcgcgaaaaaattggtgaagttagcaacgacgcccagaatttattggtgccccttgtgttggaatatcccaatagtgatgcgattaagattcaagcacaaaaggaactccttgccgcagtgggtgtgcagctagagagcttcggccaaaatagttttgttatccatagtcatccgacgtggattgcgcaaggccaagaagaagcaacgattcgcgagatgattgacactgtattggaaaacgggaagttagacattgcccatttccgtgaaaaaacggcgattatgatcagctgtaaacagtcaatcaaggcacaccatcacttagatgatgcgcaagctaaagcattgttggttgatctggcacagacggaaaatccgtttaactgtccacatggccgaccggttttaatccattacacgcaaaaagatttagaaaaaatgtttaaacggattcaagatccacaccatagttgggagggcgaataatgtttatcttagcatcacaatcaccaagacgccgcgaacttttacaaaaagtcgtgcctgatttcgaagtccaacccgcaacaatcgatgaacgccaggtaccagtgacggcaccagctgactacgtgcagatgttggcgcaacttaagggtgaatccatcgcccaaaagaatcctcaggccactgtgctcagtgctgatactgttgtcagttttcagggcacgatttacggtaagccacatgatcgtcaagatgcagccgaaatgttacggcaattgagtggcagcacgcatcaagcttatacaggtgtttggttatccattgatggtgaaatccgcaaaacggttgtccaaactgatgtcacgttctggccgttaagtcatgaaatgattgaaacgtatttagacaccgaagagtaccgggataaggctggtgcttatggtattcagggacagggaagtctgctcgttgagaaaatcaacggtgacttttacaatgttgttggcttgcccatcagtacggtggctcggttgttaaccgctaaggaggctgactaatggcaacgcaaaacattgccgtttattgcggcgctagtagtggtaataaaataatctacacggaagcggctaaggcgttaggcacttggattgctgggcgcaatgcgcgcttgatttatggcggcgcccaagttggtttaatgggcaccgtggccgacacggtgttagcccatgatggacaagtgaccggcgtcatgccagggtttatgagtcagcaagaactcgtccatccaggtttaaccgaaatgattaaggttgatacgatgtcagcgcgtaaagccaagatgattgaactggcagatgtgtttatcgcattgccgggtggtcccggtacgctggaagaaatgagtgaagttatttcatgggcgcgaattgggcaacaaaatggtccctgcattttttataatgtcgcaggctattatgatttgttacaacaatttttagcccacatggtcagtgaaggttttttaacacaggtcgattttgaaaaatacttatttaccgattcgttcagtgtgatggcatcctttatcaaggattaccaaccgccgaagattcgtgaatactaattgctagggtttgagttggccgtgggtcacacttaggcccttcttttacgctttttggctgctggctgtttcacgattcggattttatgttacaatttaacaagcaaatatacgttctcgtaaagtaggtaaatttatgtatgaatatttaaaaggtttggtgacggcggttagtccgtactatgtcgtcttagaagttcaaggcgtcggctatcaattgcaagttgctaatccgtatcgttacaccgaatcaacgaccgatatcgttcagatttatgtctatcaagcggttcgtgatacggatatcacgttatttggtttttacgatctagatgaaaagcaaattttccaaaaattaatcagtgtttctggaattggtcctaagagtgccttggccatcttagccaatagcgatcattctgggttaatccaagcgattatgaatgatgatgtgagctatttgaccaagttccctggggttggcaagaagactgcccaacaaattgtcttagatttaaagggcaagctcggtgatttggaacaaaccgaaacgctcgctggtcaaacggctatcgatcttggtacgcctggtgaatcaccagaattaaacgatgcgttagcggcgttaaccgcgcttgggtattcagcccgcgaagtcaaagcgattaccaaaacactggctgatttcaatgcacaaactacggatcagtacttacgtgaaggtttacgcttattaatgaagaaataaaggaggactaatggatggcagaagaacgaattgtttccgcagaaaacgaagatttcgcagaaacaagtattgaaaagacgttacggccacaagtcctcgcgcaatatatcggtcaagaccgggtcaaaaatgagttggcggtttatattgaagccgctaaaaagcgggaagagtcgttggaccatgtgctattatatggcccgcctggtttaggtaagacgaccttggcgatggtgattgccaatgaactgcatgttcagattcggacgacgagtgggccagcaattgaacggcctggcgatttagtcgcattgttgaacgagttacaacctggtgatgtactatttatcgatgaaattcatcgcttgccgaaagtggtcgaagaactactttattcggcgatggaagatttttacatcgatatcgtggtcggacaagggccaactgcgcacccggtgcattttccattgccaccgtttaccttgattggcgcaacgactcgggccggtttattgtcggcaccgttacgtgatcgtttcggaatcgtcgaacatatggcatactatgatgaagatgatttggtcgatatcgttgaacgctcggcagatgtctttaacatggccattgtccaagaaggcgcgcatgagattgcccgtcgttcgcgggggacgccgcggattgcgaaccgcttattaaaacggattcgcgattacgctcaagtggcggaccaagcggcaattgatcaagcgattgccgaccatgcgcttagtcaactacaagtcgatgtacgtggcttagatagtattgaccgcaagattctccagatgatgattgactattatcatggcggtccagtcggtctaaagacgattgcggctaatattggtgaagaaaatgaaacaatcgaagccgtttacgaaccgtatttgttacagattgggttcttaaaacggacaccgcggggacgtgttgtgacgcccgctggttatgaacatctcggcattccctattcagaaaattagaaagaggttacacaatggtttcaacagaagattttgattataatttaccagaagaattaattgctcaaacaccgatgattgaacgggcagcgtctcgtttattggtgatggatcacaaaacaggcgcactagaagataaagttttctacgacattatcgatgaattaaatcccggcgatgcagttgtcatgaacaatacgcgggtcttgccagcacgtttatacggtgtcaaaccggatacgggtggccacgaagaagtcttgcttttaaacaacacgcatgacgatgaatgggaagttttgatgaagccagcacgccgggccaaagtcggcaccgaagtcgtttttggtgatggtcaattaaaagcagttgtgaccaaggaactcgaacacggtggccgcatgatcgaatttaagtatgatggcatcttcatgcaaattctagaagccttaggcgaaatgcctctaccaccatacataaaagaaaaattagacgatccagaaatgtatcaaaccgtttatgctaaagaaccaggttcagctgccgcaccaactgctggcttccactggacagaagaactcttgcaaaaggtgcaagataaaggcatcaaactcgtgtacttaacgttgcatgttgggttgggaactttccggcctgtttcagaagacaacgtggaagatcacaaaatgcacagcgaattttaccgtttaacagaagaagctgctgcaacgttgaatgaagttaaacaaaacggtggccgcatcgtggcaacggggacaaccagcattcggacgctagaaacaattgcgacgaagtttgatggtgaactcaaagctgatagtggctggacatcaatctttatcaaacctggttatcaatggaaagctgttgatgcattcatcacgaacttccatttaccaaaatcaaccttagtgatgttggtcgcttcatttaccggtcgcgaaaacatcttaaatgcttatcaacacgctgttgatgaacggtatcgtttctttagcttcggcgatgccatgtttgttaaataattcgacaaaaatgaggtggcagcattgatgtatttgagaaaagcaacgtttacagatttaccgcggattttagagattatcgaacatgcaaaggccgccttaaaggatcgccaaataaatcaatggcaagcaggtgaacctaatcaaactcagtttgaagacgagattcgccaagaattatgttacattctgatggctgaccaacaggtgattggggtcgcctcaattctagcaactgaagatcctggctatgcagcaattaccaatggtcaatggcaatctggttcgacaccttatttttcaattcaccgtgtcgcactcgatagtgccttccacggccaacatctcgggacacagtttttaaccttattggtgaccgctgccagtttacgaggcgcacatgatttacgcatcgatacgcaccctgataacttggcgatgcaacatatgattcaaaaagtaggctttcaatatcgtggtgacatcttcattgcaaacggtccgtcaccgaaacgctatgcgtaccaattattactgaaccaacaataatcctagaattggagtcgattaaatggaaccagcgatcaagtatcgtttaatcaagaaagaaaaacataccagggcgcgccttggtgaaattgtgacaccacatggcacgtttaaaacacccatgtttatgccagttgggacccaagccagtgttaagacaatggcgcctgaagaattaaaagaaatgggtgccggcattattttatcgaacacctatcatctctggttacgacctggggaagacatcgttgaaaaagccggtggtcttcataagttcatgaactgggatcgcggtgtgttaaccgattctggtggtttccaagtgttctcacttgcgagattacgggatatcagtgaagaaggggttgctttcaagagtcatttgagcggcgaaaaactgttcttatcaccggaaaaagcaatccaagtcgaaaatgctttgggtgccgatatcatgatgagtttcgatgaatgtccaccattctttgaaagttatgactacgttaaaaaatcagttgaacggacatcacgttgggctgaacggggcttgattgcgcatcaaaacccagcaacgcaaggtctatttgggattgtccaaggggccggctttgaagacttacgccgccaaagtgcgcgcgatttagttgggatggacttccccggttattcaatcggtggcttatcagttggtgaatcaaaaggcgaaatgaatcgcgtgcttgatttcacaacaccaatgttacctgaagacaaaccacggtacttgatgggcgtcggttcgcctgatgccttaatcgatggtgtgattcgcggtgtcgatatgttcgattgcgtgttgccaacccggattgcccgtaatgggacaacgatgacctcacaaggccgattagtggttaagaatgcgaagtactcagaagacttccgcccattggatcctaagtgtgattgttatgtctgcaagaactacacccgcgcttacattcggcacttgattaaagcggacgaaacgtttgggattcatttgacgagttaccataacttatacttcttgattaatttgatgcatcaagtgcaagatgccatcgaacaagataatttattggaattcagagaagcgttcttcgaagaatatggttacaatgaaaagaacactcggaatttctagtgaatcactggaagttgcttgataagtctgatagagttagtaatagacaaaattgaaaagaggttttttaaatggcaaactttgtgttaggtgccggcggttttaatcccagtttcttcgttatcttaattttaatgatggcaatgatgtatttcatggtaatgcgcccacaaaagaaacaacaacaaaaacaccaagaaatggtgaaccaaatgaaaaaaggcgacgcagtcatcacaatcggtggtttacacggtgtgattgattctgttaatacagatactaaaatcgttgtcttagattgtgacggcgtttacctcaagtttaacttgagcgcaatccggacagtaacaccaactgcttcagaagccgcaacagtggttgaagaagaaacggttgaagaaacaaaagaagatacaaaataattcagagagcgctcgattgaatacttcaaccgagcgcttttttatttgcattatatagtaaatttattatcaaatgtaggcttttaaaagataaatcgcctttaactaagaaataaaatttgtaattataatcacaaaacagtttacaaacaactcaaaatgcgctaaactaactttgttaaataaatcacaatagttaattggcatggagggaatcgatatggttaagaaagcagcagttgaaacggttgaaaacacagtgaatgaaatggtcaccgatttagtgacgcgtgcacaacgggcattagcaattttggaaacattcgatcaagccaagattgataatattgtccatcaaatggcgattgctgggttagaccaacatatggcactcgctaagatggcggttgaagaaactggccgtgggatttatgaagataaagccatcaagaatatttttgcaaccgaggaaatttggaatgcgattaaagacaataaaacagttggtgtgattgaagaagatccagaacatggcatcactaagattgcagaacccgttggtgtcattgctggtgtaacaccagtcacgaatccaacctcgacgacgatttttaaagctgagatcgcgattaaaacgcggaatccaatcatctttgctttccatcctagtgcgcaacgttgttcggctgaagcattgaatgtcattaaagctgcagcagttaaagccggtatgccagcagatgcactcttatatatcgaagaaccaagtattgcagctacccaggctttaatgaaccatgaaggggtcgcaactgttttagcaactggtggtcctgggatggtgaaagccgcttattcaactggtaaacccgcactgggggttggggctgggaatgcgccagcgtatatcgaagcttcggcgaacatcaaacaagccgtcaatgatttaatcctctcgaaatcatttgataacgggatgatttgtgcttctgaacaagccgtaattgttgatgctgaaatttatacggcagtgaagaaggaattccaagcacaaggggtttacttcgctaaaccaagcgaattatcagcactcaatgacgcagtaatcgacccagataagaatgcggtccgaccttcaattccaggccaatctgctgctaaaattgccaaactagctgggatcgatattccagaagatacgccagttttaattgctgaaattaaaggtgttggacaccaatatccactctcacatgaaaaattatcacccgtacttgcgatgattaaagctaaagatcgcgaagatggcttgcaactctgtgaagcaatgctagatcttggtggtcttgggcatacggcttcgttgcatacaacggatgaagctttaccactcgaatttgcaaaacggatgaaagcatgccgggtcttagtgaatacaccatcagcacaaggtgggattggtgatttatacaatgacatgttaccatcattaaccttaggctgtgggtcatacggccataactcaatctcccacaacgtttcaacgatcgatttgttgaacgtgaagacgctaaccaagcgccggaataacatgcaatgggtgaagttgcccagcaaaatctattttgaaaaaaattcagtcaactatttagaaaaaatggcggacttgcataaggtttttatcgtcgctgatcaagggatggtcgacttaggttacgtgcaaattgttgaagacgtcttggcgcgccgcacagatcaagtgcaggtccaagtatttgccgatgtcgagccagatccatcaaccgataccatttataaaggcgccgaagtgatgaaacgcttcaaacccgatacaattgttgctattggtgggggctcagtcatggatgcggccaaagggatgtggttattctatgattcagaagatgccgacttctttggcgctaagcaaaaattcttagatattcggaaacggacttacaagttcccaaacctcgatcggacgaaactaatctgtatcccaaccacttctggaacgggttctgaagtaacgccgtttgcggtcattactgatagtgaaacgcacatcaaatatccattggcagattatgcgttaacaccagatgtggcaattgtggatagtcaattcatcgaaagtgtgccaccccgcgtggttgcgcatactgggatggacgttttatgccacgcgactgaaagttacgtatcagcgatggcgtcaaattatacaaaagggctcagtttgcaagccattaaattagtgtttgataacttacaagcgagttatgcgggcgataagacagctaaagccaatatgcatgatgcgtcaacaatggcgggaatggcgtttgccaatgcgctattaggtatcaaccattcactggcgcacaaactgggcggcgcgttcaatttgccgcacggattgatgattgccattacaatgccgcatgtcattcgctataatgctaagacaccaacgaaacgggcactctgggctaaatacagttacttcagagcagatgaagattatgctgaaattgcacgttatctcggtttaccaggtaaaacgactgaagaactggtggccgcttacgcagatgctgtgactgcattggcggaaagtatcggcatcaagatgcgtttacgtgataatggcgtgacaaaggccgactttgatcgccacgttgatgatttagcagaactggcatatgaagataactgtacggtaaccaatccaaaagaaccattaattaaagaattgaaagggattctcgaagcagaattctagcaaattgaccaagtgatttgctagaataagtggtttgagaagcccgaccacaaatttaaggcggtagactgaaacaaatcggtctaccgcctttttttgttgctgaaaagagattaattttttactatttaagggattaaattgaagcttaatggtatgaaaattattacaaataaggcataatagaaagtagacattcatttagttcagggataactaagaaaagtttgtcgacaaacttgattaaggatctggatggcaatgacacccaataaagaagactatttaaaaattatttttgaacttggtggcgacgcaaagaaagttaccaataaggaaatactagcgggattgaacgtttcggcggcatcagtcacggaaatggtcaataagttagtgaaggaaaactacgtcaaccacacaccttaccaaggaattcaactaacaagtgaaggcgcccgcgaagcagccctattagtgcgcaatcatcggttatgggaagtttttttagtcgacaagttacattatcaattcaatacggtgcacccagaagcagaacaactcgaacatgttactaatcacgacttggctgaacggttagctgatttcttggggcatccaacgcgttgcccgcatggtgggattatacccaatgccaagggggaattcgaacaacaaagtcacatcgcacttgaaacattacaagtgggtgaaacggcgattatcgatcgcgtattggatgataatgacttattaaaatatacactggaaatcggcttgtcagtcggtgacagtgtgacgctccaaaaggttggcctcttcgaaagtccgttgactgtttttaataatacgagtcaaacagaaatccaaatcggcctcaaagcggcacaacacatctttgtgacgccacaaaattaatttatatgaaagtggtgtgagatatgcacacagatttagcagcactctttattatttttggtggttccggggacttagcccaacggaaattataccccgcattatttaatttataccggaagggttatttaaaagaacacttcgctgtcattggaacagcacggcggccatggacggatgatcattatcacgaaatcgtcatgacagctttggacaactttgatgaagatcaagcaactaaagaagctttcgtaggtcatttctattatcaatcacatgatgtgacggacgccaagcactacgaaacattaaaggctttagcaagtcagttggatgaacaatacgaattacaccaaaatcggatttattacatggccatgtcaccacggttcttcgggacaatcgcaagtcatctcggatcagaagcgctcctaacggcggatggctttaaccggttgattatcgaaaaaccatttggtcgcgattatgaaagtgctaaggcgcttaaccaagaattgacgcaaacctttgatgaagaccaaatctaccggattgatcactaccttggtaaagagatgattcaaaatatcgttgctttgcgttttgggaacggtctattgagtggtgtatggaataatcaattcattgataacgtccaaattacgttggctgaatcagtaggggttgaagaacgcgctggctattacgaaacatcgggggccttgcgcgatatgttccaaaaccatatcatgcaagtgatcggaatgcttgcaatggaagtgccggttaactttacggcagaagatgtacaacgtgaaaaaacacgtcttttcagaagtattcaaccttactcaccagcagaaatcaaacaaaactttgtgcgcgcccaatatgctgaaacatcggtggatggcgaaaacaaaccggggtatcaacaagaaaccaacgttgcgcctgattcacaaaccgaaacatttgtcgctgggaaagtgatgattgataacgaacggtggtgtggcgtaccattttacgtccggaccggtaaacgattggcacgtaaagaaacgcaaatcaatatcgtcttcaagaagactggcgtcaatatttttgctgatgataagtcagatcgttcagcaatggcacctgatgtcttaacaatctatgtcgaaccggaacaaggcttttcattaacgattaatggtaaagaagtcggtcaaggattcgccttgaaacctgatcaattggcttaccaatatgatgaacagatgttggctgacagtccagaagcttatgaacgtttgattttagaagcgctcaatggggatggcacgaacttcacacattggcatgaattagccgcttcatggcaatttgtcgatgcgattcgtgaagtctgggatgcggatcaaacgccactaccaggttactcaatcggttcaatggggcctaaagaagcaacagatttactggcaacaacaggggccgaatggatttttgatcccactcaaaataattaaattaaacaagtcagcaaagtctgtgtatgagatgctcatgccaggcttttcttattgaaagaagtacgtcatcaacgggtaacttctgagcatttacagcacttgacgaattggcgacggaatcgccgatttggcaagtgaggtaaagcggaagaagttgttgataaaagcacgttaaaggaagaagtgcgttaattcgcggttagcctttgagcatttgcctaatcagacggataagcgccaagggcgattatttggctgatgtagcaaagcacagaaggttacgaattaaaagcacgttaaagaaagaagtgcgtcaaaagcggaacaatgtgcctgaaaaagcatgttgaaaaaattaaggaggggtaacatggcagagctgttcaagattccattagaaaatgatacgagtcgcaaaatcattcacattgatatggacgcgttttacgcatcgattgaagagcgtgaacagcccgacttacgccaaaagcccctcgtgattgcccgtaatccgagtgatactggtggcaaaggggtcgtgacgaccgcgaactatgttgcccgacaatacggtgtgcactcggcgatgagtgcgcaaaaagcagctgaactgattccgaatcaccaagccgtttttaaggcgcccaattttccgctttatcaatcggtctcggaacagattcacacgatttttcatacggtaaccgataagattgaaccgattgcttttgatgaagcgtaccttgatgtcacggaaaataaactcggcttggcacacacaattgatgtggtcgcctacattcaaaaagaaatccttaaagaaacccaactcgtcagctcggcggggatttcgtacaataaatttttagcaaagatggcatcggattaccgcaagccagcggggcggacactcgttttgccggaacaagcgattgcctttttaagtcgcttgccaattgaaaaattccgtggggtcggtaagaaaacggcgccgcgaatgcaagaactcgggattttaacgggggcggacttgcttgaacaatcagaaatgatgctgatgcaaaatttcggcaagcttggctacggcttatatcggcacgtgcgcggcatcgataatcgcccggtcgcctaccaacgtgaacgcaaatcaattggcaatgagaatacttacgggcaacccctaatcagtgaagagcaggtgcaagttgagttgaagaagttagcgattgaacttgaacggcgtttacgcaagaatcaaaaacacggtttgacagttgttttaaaagtgcggaatcgccaatttgaaactattactaagcgtaaaacatttaacgaatatgtcggcaaggcagctgaactcgaggcgatcgcttgggaaatttggcaaaccatcggccatgcagaagatggcgtgcgcttgctcgggattacggtgactaacttggcaccgcaaacatttgaaaacatcacgttaccgttatacgattgggagcgtgaatagttgagtttcctttgtttttgtgcgctaaaaccgatatactattaataactatgtaaatctgataaagggtggtggcgttgagtggcaactaagcatgatcaaattttaatgtacatcgaaaatttaccaattggtgacaagatttcggtgcgctcaattgccaaaacactctcggtaagtgaaggaacggcttatcgcgcaattaaagcggcagaaaataacggcctggtcagcacaattgaacgggtcggtaccatccgcattgaacagaagttaaaggggaagattgaaaatctgacctttgaagaaatcgttcaagtgattgacggcgaggtccttggtggccgcgctggtttagacaagttgttggacaaatttgtgattggcgcgatgcaaatcgatgccatcacgcgctacattacgccaaagtcattgatgattgttggtgatcggacggatgtgcaacgcttagcacttgaaaacggggccgctgttttgattaccggcggttttggcacttcggcggacgtcattgcattggccaacgacttggctttaccgattttgcaaactgcctacgatacctattcggtggcggcattgattaatcgggcgttgaccgatcaattgattaaaaaagaaatcataacggtggctgatatctaccacccacttgctgaaatccacacgttacatgctaatcaaacggtagccgactacaagcaattgagtgcggcggtaaaacaatcgcgttttccagtcgtcaacgaacatatgcgcctcgttgggattgtgacggtgaaggatattttagataaaccggccacgatgaccttggataaagtcatgaccaaggaacccgcgagcgttaaaaaatacatgagtgttgccagtgtcggccattcaatgacttggaatagtttagaagtgatgccagtggtggcggacaatttagaactagaagggttaattacccggcaagatgtcatgagcaacatgcaaacggcgcaacgccaaccgcaagtcgccgagacgttttatgatcagattgtcgaaccactgcgtcctagtgaaactgtcccagacttttatacggcggcatatgaatatgaagtgacgccccagatgacgaataacttagggacaatttcgtttggtgtactgaccgaagcggtttcggcagcttgtcaacaaatgctccagacgcaacatcagcgctattcaatgattgaacagatcaacctccattatttacggttgattcaaatcgacacgcagattcagattttaccacgcttgctcgaaattggacggcgttcagctaaaatcgatgtcgatgtttacgccaatcatgtgattgtggctaaggccctcgtcactggtcaactcttagaaagaggttaataaatgacaactccagaacaaattattgctaaaattgaaacttacgatacgattatcatccatcgtcatgtcaatcctgatcctgatgcgattggctcacaagttggcttagctgaagtactgcgtaacagctacccagacaagacgatttaccaagtcgggagcgacaccggtaacttggcatggctcgcaaacgttcaagaaattgaaccggctgcttatcaaggtgcattagtgattgtgactgatacagccaactcacctcggattagtggtgagacgtttaacttaggcgctgaattaatcaaaattgatcatcatcccaacgatgatccttatggggatttaaactgggtgttacctgatgcctcaagtacctcagaaatcattattgacatcgtcaataacagcgaaggccacttacaattcaatcaagcagctgcgcgtgttttatatgccgggattgttggtgatacggggcgcttcatgtttaattcaaccagtccacataccatggaatgtgccgcccaaatgatgacgtttgatattcaccatgataagctcaatcaaaagatgaacgaaatcacgttggaacaagccaaattacaagggtacttattcgatcaacttcaagtgaacgaccaacaagtcgcctacttagtggttgatcgcgcaacccaggaccggttacatgttgaaccgcaacaagtacactcgattgttggaacacccggtcgtttgaaaggggtattaacgtgggtcatcttcgtgcaacaagcagatgacacttaccgtgtgcatttccgctcaaagggcccaatcattaatgaactagcgaagcaacatgatggcggtggtcatccactcgctagtggcgctaaggcagctgatcaagctgaaatcgacataattattgcagaattatcagcgctagccgcgcagtacactgaatagacgcagatccagatttaccggattcaaacaatagaaagcaggactttatggataatcaatttacacaatttaatctaaaacccgaaattattgcggctttagacgacatgcactttacaaaacccacggcggttcaacggcgtgtgattccagccatcaacgctggtaaaagtgttatcggtcaatcacaaacggggagtgggaaaacccacgcgttcttattaccccttttaaataaactggtgcctgaaaaagacgaagttcaaatcgtcatcacagccccaagtcgcgaattggcttaccaaatctatacggctgccgaattaatcactcaacacatgacgggggatattcggattggtcgttatgttggtgggactgacaagcaacgccaaatcgaaaaactcgaacaacatcaaccacagattgtgattgggactcctggtcgaattttagatttaatcaagagcaaggcgcttaagatttatacagcgaagatcttggtcatcgatgaagcggatatgacacttgacatgggctttttgaagccagttgatgacatcgctagtcgtttgccagaagacttacaaatgatggtcttctcagcaaccattcctgataagttacaacccttcttacaaaaatacatgcacaatcctgtgattgaagaagttaaaaacgaaactgtgattagcccaacaatcgacaactggttagtgccaacgaaggggaaagccctcaaccaaaccatttattcattattgacgatgggccatcctttcatggtcttggttttcgctaatacgaagagcaaggttgatgacatccaccgttatttacaatcacaaggcttgaaagtcgctaaaattcatggcgatattccaccacgccaacgtaaacggattatgaaagaaattcataacttagactatcaatatgttgtggcaactgatttagcggcccgcggtattgatatcgaagggattagcatggtcattaatgctgaagtcccacgtgaagatttagaattcttcattcaccgggttggtcggactggtcggaatggtcttaaaggaaccgcgattacgctttatggtccagatgatgaacaagccgttgcacaaattgaagcaatgggcatcaagttcacaccaaagacatttaaagatggcgaattggtcacatcatatgatcggaaccgtcgtaaaaaacgggtagctaccacgcatgaattagatgtcggcatgaaagggatggtcaaaaaggccaaacttaaacgcaaacccggttataagaaaaagattaaagcagccattaaacaagatgcacaaaagaaacgccggattgaacaacgacttgaattacgtgaaaagaaacgtcaaaacaagaagcaaaatagctagttaattcataatcgaggtggctgtgatgcatgaaaatgacttacaattactgaactggttatcgttatccgaagaagcacggcgcgctaattttggccaggtgttgcgctactttgttagcccgctgattccaattgaagcgattcagagtgagaccgcaacgattggcactcaagtatttcaaacttacagtgcccggctagctgggcagcagtttatttttatccccggccaagctaatgtgcagttgggatggcaagcaggggcagcccacttagcaccgagtgagtggtttgcacaaactaaacgtacgttaccagttgatcaaggactcgtttgggcgacgcaagcggatgtcgatcaatacgttgatcagatgacatcagaatatcggattgttaatatggcaccgatgttagtggcacaaacaccaatttcaagtgagtgggtactccaaggcgagtatgaaacgacaacaggacgttttaatggaaaccaactagttgggcgtcagtttttggcggaaatccaaaataccttgtttcgggcgcggcgggaacaaaattcagctgaaacacttgaaagtgcgcacctaattttacaagcgggtgggcgaccagattgttaccaagtgtttgaaaaaactaatggtgacgaaagtgaactacgccagacattgcggcggcgcggttttgatctggtgagtgttgatcagtatgaatggcttaaaggtgcagggagtaagacgttgtggttaagtggtaatcacttaccacgaccgactcagcgccagcagatgccatttgggttacaagcaacagccgctgacggttatgaacttactcaagatccacttgtttataagggtggtgcttgtgtgacagggggacggtatagtttggaacaatggttgcctgaagcacccgcctatgaatctgggattcaaacggcggcattgggcaatccgacgcttcagtgctactatcggcctgcgattaccgttaccttggattagttgacaattcagcaaatcttttttatactttggaagtgttgggatatacgcaacgaactgacggagacaggaacgcctttctagactgagagaaggtgccgccattggttgacgtgctccccaacatcacaaacaattcaataaactcataaagaggttaacgactaacatcgttgcaatcaaggtggtaccgcgcttttgcgtccttgaaattgcagcggtgttttatttttttgaaggagcaaacatgatgaaaaaactaaccagtgcgcaagtgcgccaaatgttcttagatttctttaaagaaaagggtcatgatgtcgaaccaagtgcatcgcttgtcccagatgatgatccgacattattatggattaactcaggggttgcgaccctaaagaagtatttcgatggtcgcattgtacctaataatccacggattaccaatgcacaaaagagtattcggaccaacgatattgaaaatgttgggaagactgctcgtcaccatactttcttcgaaatgctcggcaacttttctgtcggggactatttcaaagaagatgcgattccatgggcttgggaattcttaaccagcgacaagtggattggtttcgatcctgaaaaattatacgtgacggtttatcctaaagatcaagatgcgcaccggatttggcatgaaaaagtcggtttgccagaatcacacatcattgaagttgaagataatttctgggatatcggtgaaggcccctgtggccccgattcagaaattttctacgatcgtggtcaaagcttcaacaacgttagcgaagatgatcctgaaaactatcctggtggcgaaaacgaacgttatctggaagtttggaacatcgtgttctcagaattcaaccatttaccaaacggcgaatatgttgaacaaccccacaagaacattgatacggggatgggcctcgaacgacttgtttcagtgattcaagaagccccaaccaactttgaaacagatttattcatgccattgatcgaagcgacagctaagatgagtgaccacaaacaatacggtcaaaatgcagctgatgatatttcattcaagattatcgcagatcatgcgcgggctgtgacgtttgcaattggtgacggtgcaatgccggccaatgaaggtcgcggctatgtactccgccgtttaattcgtcgggccatcttaaatggtaagaaactcggcatcaacgacgctttcatgtacaagttagtaccaatcgttggtgaaatcatgcaaagctattacccagacgtattagcacaaaaagaattcatcgaaaaagtcatccgttctgaagaagatcgtttccgtgaaaccttgaatgatggtttacgtttattgaaccaaacgattgacagtgtcaaagctgctggtcaaagtgaaattgctggggcagatgctttcaagttatttgatacgtatggtttcccaatcgaattgacaactgaatatgccgaagatgaaggcttaacggttgatcaagctggtttcgaaagtgaaatggcacaacaaaaatcacgtgcacgtaatgcccgtagtgatgaacaatcaatggggatgcaaaacgaacttttaatggatatcaaagtggaaagtaccttcactggttatacaacgcttgaaacagaaagtaagttaagcgtcatcttacaagataatgccgaacaacaaacgattaagagtggtacggcgcaattaatctttgaccaaacaccattctatgctgaaatggggggccaagttgctgatcaagggatcattaagaacctagctgggcaagtagtcgctaaagtgactgacgtgcaatacgcaccaaacgggcaaccattacacaccgttgaagtgctcgaagaaatgattagtggtgtccactatgtcttatcagttgatccaaccttccgcggtggcgtcattaagaatcacaccgcaacgcatttattggatcaagccttgcgtgatgttttaggcgaacatacgcatcaagctggttcattggttgaacctgactacttacggtttgattttacgaacctcggtcaagtcacaccagatcaattagccactgtggaaaaaattgtgaacgaaaaaatttgggctgcactacctgtgaatactgttgaaaccgatattgaaacagctaaacaaatgggggccatcgcactctttaccgaaaaatatggtaagacagtccgagtggttcaaatcggtgattactcaatggaactttgtggtgggacgcatgctgctaacactgctgatcttggtctattcaagattacgagcgaatctgggattggtgccgggacgcgccggattgaagccgtgacttcaaaggcagccttcaagtatttgaatgacaaacaagccttattaaatgaattagctggtgaattgaaagttgctcaaaccaaggatttacctaagaagattcaacaattacaatctgacttaaaagcagaacaaaaagaaaacgaacaactcaaagcaaaatttgcccaacaacaagctggcaatgtttttgaaaatgtcgaaacagttggtcaatggcgcttagtggctgctgatgcaaaagttgccggaatgaacgaattacgacaattagcggatcaatggcaacaaaaacaaatttcagatgtcttagtgctcgcaacagttgcgggagataaggttagcttgattgtcgcggtcgcacctgatgcgattaaagcggggattaaagccggtgatttgattaaacaaatcgcaccactcgttggtggtggcggtggtggccgtccagacatggcccaagctggtgggaagaatccagctgggatcgcagatgctttggcagctgctaaaacagctttagcgaacgcttaacttataacgggattgtcgtcaattttttattgattgcaatcccgttatttttttgttctttttgttaatcaatttagcgaaatgtgttatagttatctctcatccgcattctgctaagagaggggagagttgtactttgtcctgttttcgagtagaatatggttgtataagtagcgaaaagttgaggtgttgagagatgaatctagataaaacagtccattttgattttggtaaaaatagccccaagaatgttcatgaaacattaacgacggtctatcagacattagaagagaagggctacaacccaattaatcagattgtaggttatctgttgtccggtgatccagcatacattccgcgctataatgatgctcgtaatttaattcgcaagcacgaacgtgatgagattatcgaggaattagttaaaaattatttggataaggaaacgacgaaataatgcgcttaatgggatttgatgtaggatcaagaacggttggcattgcgattagtgatctattgggctggacagctcaaggggtcgagattattcgcatcaatgaagatgaatcagaatttgggttagaccgcgtcaaggaattggttgcagaacatcaagtgactggttttgttttggggttacccaagaatatgaataattcgattgggccacgggcgcttaaagcgcaagaatacggggcaatgctgagtgaacttttcccagagattccggttgattacatcgatgaacgcctaacaacggttcaggctgaacgcatgttagtggaacaagcagatacgtcacgtaagaaacggaagcaagtgattgataagcttgctgcggtgatgattttgcagaactacttggacgcgcacggtcgcttaacacaaggctaataaataaaacaattaaggagttttgatgaatgactgaagataacaagaacatccaccaagatgaagaacaacaaattacactaatcgacgaccaaggtaacgaggaattataccaagtgctctttacatttgattcagaagattacggtaaatcatacgtgctattgtacccaacaagcgctgaagaagatgaagaagttgatatccaagctttctcattcacatcagacgatgcaggcgatgccagcaaaggtgacctattcccaatcgaagacgacgaagaatgggaaatggttgaagaagtactaaacacatttttggcagacgacaacatgaaataagtgcgttcaaaccggttatactttgaggactagcatagtcccgtgaatgagcgacgaagtcgatcgtttgcgggacgtagctagccgcagaagtatggtttgaaaagtacgttaaagaaaagaagagcgtcatcaacggggaacttctgagcatttgcctaacttagcgaattggcgatgcaatcgccgatttgataagtgtagcaaagcacaggaagttgttgatgaaagcacgttatcaccatctatttcaaaaagggtcccgatagcaattaattaaattgcagtcgggaccctttttttatgtggagaaggtgtgggttgaaatgtgctttttaaagctgactcttgtgcttagcttcgtatcgcaaacgaccgactttgtcggtcattcacaacactgtgctaatgctcagagtcaacccgctttaaacgcactttaaacgtgctcttacaggcatatttctgcgcttaactaaatttgccaaatcagcgattacatcgccaattcgtcaaatccagttaatgctcaaaatatcaccgcctgtagtcgcactctataacaatttcttcgctttttccgtgttaataaaatgcaatttagcgaattcgcctaggtaatcgatgccaccttgtgcgagtaaatctgcggcgatttggttaactgcttgatgattgccgagcggaatttggcggcccgcttttttagacagttcaagcattgataggttggcttggtggcgcgcaatgattgaagcggcagcaacggcgaggtgaaattgttccgccttggttgagaaataaacgttctcgcgtaaaacaaccggttcattcttcaaatagttgtagtaaatgccgcgtggttcgaattgatcaatgaggatgccagcgggtttttcgggttggattttttggaggactttgaggagtgcgaaattatggctgatggccttcattttttcgatgttcattgtggcgtgtacttcattgtatttcggtggcatgatgttgacgatgtgataggggagtttagccatcatcttgattgccatctgatcgatttgtgcatcggttagcgttttggaatccgcgacacctaggctattgacgaacgccagattttcttggctgacatagacggcggcgatggtcagcggaccgaagtagcttccgttaccaacttcatctgagcctaaaacggaccatttggcaaaatcagctggtaaaacatcgcctttggcggctttaggcttagtacggctagcagattttgctttgctaggggtagcggtgccccacttagcagcttctcgttcggcactagcgccttggaaaagtactttgccagatttatagccggtaatgcttagtccattggcttggtgcgcaaaaacggcccccggcggtagttgacggttggtcggataatttttttgaatagtagttaattgtgagggtgtcactttaatgactgcttgcatacgattggctccttaatgagtggcaaatgaagagattcggagtaaaattgccactttcccttatttcatgataaaatagttcagttgaactagcaaataaaattagagtgcgactgcagatggtcatactctgaggattagtagcataccgtgaatgaccggcaaggccgatcgtttgcggtatgaaactaaccggaagagtatatctgcaggagcacgttaaaaaaagagtgcgacagcaggcggttatattttgagtattaactggatttgacaaattggcgatgcaatcgccgatttggcaaatttggttaagcgcagaaatatgcctgcaagagcacgtttcaaaaatcagagtgcgcaataagctgggtatcttctgaggattagcatagactcgtgaataagcgacgaagtcgattgtttgcgaggcgtagctaaccggaagaagatggcttatggagcacgtttcagaatactttatccaatcaatcatacacacatccacgccacaaaacgcgtatctaaggggaactcatgttaagtctaattattatcttaatgctgttatatgccatttacacaggggtcagacgggggtttatcatgcaagccgtctacacgattggctactttatcgtcttttggattgccaaagcgatgagccaaacactagggcctaagctaagtttaatggtgccatacccatcggcaactgaagacagctattttgcatttttccaaaagagtatcgggttgtcactcgatgatgcgttttatatcggcgtcgcctttgtcctcgtgatgtttatcggtggcttgttggtgcgcttcatcggactattgttgaattcattgacttatatgccaggtttgaagcaatttaacaaggcagccggtgggctcttgagtttcttggtcgtttacgtggggctctttttgctcctctacgtgctggctttagtgccagtcgatggcttacagaagacattggaaaactcgacagttgcgcgcgtcattgtcttacacacaccagtcctcacctctcaagtgacgagctggtggattgctggctaaaatggatagtgcagttggggctgacggaagtcgccccttttttagaaggagttaacttaaatgaatcataaaatattacaaacactagaatacgataaaattaaacaaatgcttcaaggccatgccatcacggcgtttggtcaagaacaaatcacacaattaacccccgctaacgatgcggaattgattcaagaacgcttggaccagaccaaagatggggtcgatattgaacggctaaaaggtggcattcctttgccacagttagataatattcgtccgcacttgaaacgaatcgaaatcggtgcgactttaaacggtaccgaactcgcgcaagttgggcgggttttgcgcgcgacttctgcggttgtgcgtttctttgatgacttagaaaaagatgaattaaccttaaaggcgttgccagacttagttgcccaattggtgactttaccacaactaactgaaaagattagaagttctgttgctgatgatggcgccgttttagacacggcttcaaccaagttgcgtggcttacggactggtttaaaacaattggaaggccaaatcagatcgcggatggcaagttatacacacggtgctaaagctaaatatctgagtgatccgattgtcacgattcgaaatgaccgctatgtcattcctgttaaacaagaataccgtggccaattcggcggcgttgtgcatgatcagagtgctagtggtcagacccttttcatggaaccacaagccatcatggaattgaataaccgcttgcgccaattacaaattgaagaacaacaagaaattgaacggattttggcggaattatcggaagccatcatgccagaacgccacaatattttagccaacgctgaattattggggcaactcgatttcgtcaatgctaaggctcaacttgctaaagcgttggaggccactgaaccgctgattaatttagaaaaccatgttgaactcaaacaagcacggcacccattaatcgacccagctaaagtcgttgctaatgacatcgcgattggggcggattatcaggccatcgttgttacgggtcccaataccggtgggaaaaccattacgttgaaaaccttaggcttagtccaagtgatggcccaatctggcttatttatcactgcgcgtgaggagagccaagtcggcgtcttctcggatatttttgctgatattggtgatgaacaatcaattgaacagaacttgagtacgttctcagcacatatggaaaacatcattcagattctccaacatatcgacgatcgtagtttggtcttgctcgatgaattgggggcagggactgatccacaagaaggggccgctttagccatcgctatcttggatcaaattgggattgttggcgctgatgtcgttgcctcaacccattatccagaattgaaaatttacggttacaatcggccacaaacgattaatgctagcatggaattcgatgtggctaccttacaaccaacgtaccgtttattaattggggtgcctggtcgtagtaacgcgttcgatatttcaacgcgcttagggttaccaagctcaatcgttcaacaagctaaacaattgatgaacgatgaaagccaagatttaaataatatgattaccgatctcgaaaatcaacgtaaggcagccgaaacggaataccaagctttgcggcatgaattagcagaagcgactgacttgcatcaacagttatcaactgcttatcaacaattcttcgaagaccgtgaaacagaaatgacgaaggcgaaagaaaaagcgaatgcgatcgtcgaaaaagctgaagttaaagcagacaaagtgattaccaagttgcgggatatgcagatgaatcaaggcgcccagattaaggaaaatcaattaatcgatgcgaagtcggaattagggcaattgcaccaagaaacaaccttgaagaaaaacaaagtattgcaacgggcaaaacgacgtcaaacccttaaagaaggcgatgatgttttagttacttcatacggtcaacgtgggacattagtccggcaaatcgatgccaagaactgggaagttcaaatgggcattatcaagatgaagattgctaacgaagaccttgagaaacaaaaagtcgttgaagataaccgacctcaacggcatgtgacaactgtcaacagcggtggagcgcggtatgttaaagcccaacttgatttgcggggcaaacgctacgaagaagcaatggctgaagttgatcaatatgtcgatgcggccttgttagcgaactaccaacaagtgacaatcgtccatggaaaaggcaccggtgcaatccgccaaggtgtccaggactacctaaaaggcaatcgccaagtcaagaaatacgaatacgccccagcaaacgcaggcggcaatggcgcaacaatcgtaacattcaaatagagtgcggaagcaggcggttatacgccgaggattagcataggcagacgaatgaccaacttgttggtcgtttggctggtgtagctaaccggaggagtttgcctgctggagcacgtttacgcccccaatccaaccagtcctttctggttttgattgggggtgtttttttaggcttgttaaattaaacggggataaaataatccgtttgtaacgaataataagcgagttaagttgttatttacgccatataggagtatcatgataaataatatgttttgtacaattgaatggagggcgaagaataatggttgaagtattaacagataaaaattacgaagaagaaacaaagagtggcgttgtcttgacagacttctgggcaacttggtgtggtccttgtcggatgcaatcacctgttatcgaatcattggcagaaactaacgacaaagttaagttcagtaaaatggatgtggatgctaatccagaaacgcctgctaatttcggaattatggcgattccaacgttagtggttaaaaaagatggtcaagttgttgaaaaaattactggcttccataataaggaacaactagaaacgattttggcacaatataccgactaattatgaaaacacctactatttagtaggtgctttttttatgtgacagcgtgtgacaaaaatgttagtggttgtttaataaacgttgtggtaactttaatgatgaacaaaatgatgaaaatcaaaaagagagagaaagagatggtgaaaaaatgggtcaaaaaatacttaatttttggaataaaccggccgtcaatttcattggcaaaaccataatttattttgttattctgctaattctactttatttatatgattacagtggtatcggtagtcctaaatttatctacaatgaattctaatgaaggagcgtcgttaaaatgaaaaagaatatcattcaacaaattgatgcgattgcaattgaccaaccacaaactgtggcttatcaattaggcacgacgcaacacacttacgccgacttaaaggctgcttcagaccggattgctcatttcattcaaagccaagacttgccagctaaagcaccggtgattatcttcggtggtcaaaacttcgagatggtagcaacttttctaggtgctgttaaagcaggccatgcttatattccggtggaacaacattcagatccagcgcggattaaacagattgaatcagtcgcaacgccggctactgtcctatcatgggctggtgaaacagcgattgatgttaatatgcccgttttcgcagaacctcaattgacagatgtgattgcaaacggagcaaccgattatgatgctagccaaagtgtgcaagggaatgagaatttctatatcatcttcacgtcagggacaacagggttacctaaaggcgttcaaatcagcgaaagcaatttacaaagtttcgttgactgggccaacccagctttcaatgttgcggataacagccgcgttttaattcaagccccatactcattcgatttatcagtcatggatttatttcccgggttatgctcaggtgcaaccctcgtcgttttagaaaaagctgtgacggacaacttcaagacgttatttgaagtcttgccaactcttaaggtgaacgaatgggtttcaacaccatcttttgcagaaatctgcttattatcaccaacatttgatagtgaacatttcccagaattaaaacaattcgtcttctgtggggaagaattaacgcatcaaacagcaacaaagttaatcgaacgtttcggtgatgcgcaaatcttcaacacatacggcccaactgaagcgaccgttgcgatgacgagcatcgaaattacggcggaggtcttagcgacttacgaccgactcccaatcggctacacaaaggctgatactcaaactgtcgtagtggacgaacagaataatccagtcgcagttggtcaacctggtgaactcttaatcagtggcccaagtgtttcaaaagggtacttgaataatcctgaaaaaacagctgcagccttcttcgaaaaagacgggcaacgcttctaccattcaggcgatttggtcacccaaaacgaagatggcttgctcttttataaagggcggaccgacttccaagttaagatgcacggttaccggattgaactagaggaaatcgaccaccacttaagccaattagcagccgttcatcaagcatgtaccgtaccgcgctacaacaaagcccatcaagtcacccaattgattgcctatgttgtgccagcagacggtcaagaagcgggcaatgatttaacgaagacgttaaaagcagaactcgctgaaaatacgatggactacatgattccgcaacgatttgtttatcaagaaaaattaccattatccgtcaatgggaagattgatcgtaaagcgttgattaaagaggttaatggcaatgcctaatttacaaccgtacgcgaatccgaactactttctcattctaggtgcggcgttaattccgttagtgattggcttacttaacggcaaacgttggcatgtttatgagacacttgtctcactgctctttttgatcctaatctttgacggggataaggttcaccagggaattgccttgattggttacgtcctgttcgaaggagcactgatttggggatacactgtctatcgtcaaaagcacaataacacctggctattcgatctggctgttatcttagcgattatgccgctagtgattgtcaagttcgtgccattcttaaatccgggtagtaattcaattcttggcttcttggggatcagttatctgacatttaagtcagttgggatgattatggaaacccgtgatggcagtattaagaaatttgaaccatggttattcttacaatttatgctatttttcccgacgatttcatcaggaccaattgaccgttatcgtcgtttcaaaaaagattacctaaaagttcctgatcgtgaccattatctcgacttactgggcaaggcagtccacaacttcatgttgggctttgtgtataagtttatgctcggttacttattcgggaccgtgttactccctaaagttgcgcatttagcaatggcgagtcgcggtgggttccttgatatctcatgggggcttgttggttacatgtatgtttacagtatgtatttattcttcgattttgcgggctacagtttattcgctgttgcaacaagttatgtgatgggtgttgaaacgccaattaactttaacaagccatttgcatcaaccaatatcaaggaattctggaatagatggcatatgacattatcattctggtttagagattacatctacatgcgcttagtgttcttcttgatgaaacataagattaccaagaacaaggtcctcattgccaatctcggctatttaacactcttcttattgatgggcttctggcatgggttgacatggtactacattgtttacggcttgttccacgccatctggatcatccttaccgatgtctggttgcgtttcaagaagaaacacaaggatcacattatcagcaatcggtggacgaactacttagcaatttttgcaacgtttaacaccgtttgtctcagttttctaattttctcaggctttttggaccggttatggttccactaagacctacacactaaaggagcgatttaatcatggacgtagaaaatacagtagtagaaattttagcagatttaacagggaacgacgatattaaagacgatatggatatggaattattcgaatcagggacattagattcaatggcaactgtgcaaatgttacttgaattacaaggccaattagatattgaagtacctgtttcagaattcgatcgtgaagcatggtcaacacctaacaagatcattgctcgcgtaaaggaattgcaataaaatgtttaaacgtttatggcaaattttcggcccggttttagtggccggtctctgcttaacagccttattactatcacctcttcgattaggacgacctagcgaaaagacgttgtcgacagcggcgacgtcattatccgccaatgtgctaaaaggggaagccatcaaagatgctgcatttaacgacaactacattccgatgattggttcatccgaactatcccgaatggacgcgttacatccatctgttatggcaaacaagtatgattggcaaaataagccattcctactaggggcaccagggactcagtcattgacccactttttatcacttcaagcgactggtaatcacttgaacggtaaaaaggccgtcgtcgttatttcgccacaatggtttgtaccacaaggggtaaaacctgagatgttcgatttcttctattcaccactacaaaccagttatttcttaatccacgcgaaggattctgaaagtacgcggtatgcagcgaaacgaattctagaactcacaagtgatacaaccaacggggtaatgcgggatgcattgaagaacaaagctttaggcatacctttaacggagacgcaaaaagtatacattaataatgtgaaacgcccagcgttacaacatcaagatcaactcttcagccaattattcattcggggtcgtgaacgcgaattgcgtaaaggcttgaaggtgttaccaaaacaacctgataacatgcaacttgatcaagtcgcaacggaattaggacaaaaagtaacgggtgataatccgtttggcattcaaaatagtttttacaaaaaacgggttaaacccaatgttggtaaattgaagggtgaacaaagtcactttaactatgaaagttcacctgagtttgctgatttccaattgatgttagattacttcgcagcccataaagtatctgttcaattcatcattccacccgttaatgcgcgttgggccgcttatacagggctctcacaagcgatgttgaatcgttttgataagaagattcaatatcaattgagaacgcaaggcttcaacaacattgttgatatgactaacgacggtaatgaacaattcttcatgcaagatacgattcatcttggctggcgtggctggttgaaagttgatcaaaaactccaaccattcatgagaacgaaaaaagcaaaaacagtgcactatgacatgtcaaacgacttcttaagtcgcgactggcaaaacgtcagcggcaataacgtccatgactttgattagagtgagacagagccggttatcacttgaggattaacacgtttaatatgctaagtattcaaaaagggtaggaacaaaatttaattttgttcctaccctttttttatagcacatgcttatctgtgttttctatgcatttctcgtcgacttggtaagtctgccacgcgggttcttgtgtagtgtggtgtttcttcagaagttggcttgttttctggttccaccggttcaggaacaactggtgtttctggaacggattctggttctagtgtgggagcagccacttcttcaggggctgcttcaacaggttgtgtcatcacaggtgctggttcttcttcaacagattctgattcacttggtacagatgcgacttgtgatgcatcaaccgttaaatgaatggcttcgactgcttcgtcttcaattggtgcttttgaatctgtttggacgaaaatcgttacgttttttttattttcaatggttgctttggcttcagtcacaatccgcaattgttgttcgaggatttgggcaacgaagccggcttctaattggaagtcaggagtatcgaaatccgcaatccgtgaagcgacaatcgggcctgttaattcgaagaagtattgttccttcttctgtttcttaagactgagatggccgaagttgatttgttcgaagaaggcacagaggtcttcgaaagaatcgagtgggaattgcaaagcgagttgcttaccggcccaatagctgatggcgtcattttcggccccaagaattgatggtaacaagatatcccgtaatgttgcctgtgtcagatatgatgcagtttgtggattttgggcgagttgttcatagcgtgattgagtcacagtggcactcctttatggttcgttttttataagtactcctattataccgcgaaaactctttattttttataaaaattaacgccaactgtgaattgccggccgtgcccgttgttttagttgaattttgcaccgaaaaaagagaaaatagaagttacgagtgtatcctgaaatgaaaagagaaatctaatatgcaaaaacaacccattggttttatggattcaggtgtggggggcctaaccctcttaaaagaggcgcttaaacgtctacccaacgaagacatggtctttatcggggatcaagcgcgcctaccatatggtgaaaagccggcggaaaccgtgcgcaaatttgcgtggcagatgaccaattttctacgggggcaaaatattaaagcattggttgtcgcctgtaataccgcaacggcggccgccttacctgatttacaagcgcaattgacgattcctgtaatcggtgtgattgcaccaggtagccaagcggcattggcaacgacccgtaatcggcatgtcggggtaattgccacgaccggaacgattaacagtggcgcatatgcctatcaactaaaggcactcaaaccggcgacacacgtcacgagtttggctgcgccaacttttgtaccgatgattgaagcaaaccaattgagtggcgaaactgtgcaaaacacggttgacgaaaccctcgcgccattaagcgggacgggaattgatacgctaattctcggctgtacccacttcccattattaaccgcggcgattcaaaagacagttggaccggcagtcacgctggttgaccccgcgcatgccgctgttgatagtttgattcaggcattacaagatcgcaatcagttggtggccgatgcaacagctgggcaactacacacctatacgaccggatctgtaaccaatttcgaagcaatcgcgcgtcaatggttagcaatcccaacccttgaagcccaacaagttatcattaaggaggaaaaaaacgatggtccgaatgaataatcgtgctgataatgatttacggccagtgcaagtcacttggcgttttctaaagcaacaacccgcttctgttctatggcaacgcggtgataccaaagtgctcgctgctgttcaacctacagaaggttccttgcaagtcaatggcaatggcataacagcgcaccaattagaatggttgcaaacgacattacgccccttattggcaaccgaagcactcactatcaccgtaacctgtcttgaagatggtggcggcttattagcagaactcttcaacgctgtttattgcgcactaaccttattaccaaaaggcaaaggccccaaacaagtcgctgcagccgtcacagcagcgatggtcgctggtgagtcactcggtgacccagacgccgcggaaagcgacctagcgactagcttggtgacgatggtggccacaccgcaggaacaaatcatcgcccttgaactcggcggacaacaagcagtcaatagtagtgaattcaacgaacttattttacgtgcgagccaaggtgtgacgcgaaccaatgatcaacgtcaagccagttttgaacgcgccgttcaaccgaatatccaagtggctgataccgatgaacaaacaatcgtgattgccacgaagaatccaggtaaggcccgcgaattcgaatccgtcttcgcagcggaagggattcaaatcaaaacattattagattacccagaattgccaaacattgatgaaactggttcgacatttgaagaaaatgctcgcctaaaggcggatcaaattgcagcgatcttacacttacctgtcttggcagatgattctggtctaatggttgatgaactaggtggtcgtccaggaatttattctgcacgcttctctggtgatcataacgatgccggcaacaacgcgaagttgctctatgaattaacgggtgtgcctgctgaaaagcggaccgcaaccttccatacaacattggtttttgctaaaccagaccgaccagatgaagatttagtcgttgaaggtaacgtgaagggccaaattctaggtattcctcgtggggataacggcttcggctatgacccacttttctacgtgccagaattagatgcaacgatggcccaactcacggtggaacaaaaaaataaaatcagccaccgcgcaaaagcaattgagaacctagaagataaatggaaagaatggatcaaaaactagcgtgcgacggcaggatcacgtttagatttggctgatgtagctagccggaagaatatgtcggaagaagcacgtttcaaaaaaacaacgccccttggcgccgaaaggactgtttagtatgcgttttgttgttgtgagtgatagtcatggtgatcgcgatattctcgtgcagttagtggcgcagtatcaagatcaaccagtaaccatgttacattgcggggattctgaattaacaaccgatgatcccttgtttaaccaaatgaccgttgtgcaaggcaatatggatttcaatggtcaatttccagcacaagttgttgtcccagttgcaaatgaacgaatcttcttaacgcacgggcacttgtatggtgtaaatggcgatttaatgcggcttttattagcggcccaagaaagccaagctaatctcgcgttctatgggcatacacaccaattggcctgtgaaatgcacgaaggtgtgctgctcttgaaccctggcagcattgcccaactacgggggcagtttcgtgacttgaaagggacatacgccgttgtagacgtcacacctgaccaatatcaaatccagtactacaatcgtcggttcgaacccgtttcgcagttacactttacatttaaacgcgcctaattctaaagactatccaaagtttagtagctatggatggtcttttatgtttgctctttgttacaatctaaaagtagcattagtttattggaggccaagtgatgatttcagatgcattttcgaacttattattagaaaataaagaacacttcttaattcccggtgaggttgttgcgagtgttcaagaaagcaactccttggaacatgcgtttattctactaaccacggtgaaatattcgagcattcccgtcttagacaaccattcgaagttcaaagggatgttgacgatgccgttaattaccgagacgatgctcggattgaataacctcagtttcgaaaatttgcggaagctgaccgttaaagatgtcatgcaaaccgatgtcgtgacgattagagatccatatgatattgaagaaacgctccatctcttagttgatcacccctatctgcctgtgatttcggatgaaggggagttcacagggattgttacccggcgcgaaatgatgaaaagcttcaaccgagtagcccataatatcgaaaaagaataccaaatcgagccaataaccgcagaaacaacccaaaaaggacaataagggttaaaaaagcgtcttccagacaccaacgaataatgtttggaagacgctttttgttttggactgaatccagcttaattactggtatatcaacatttgtaagcaaaattaagttagacgtaatgactttaaaaaatccatgatagtaggtcataactcatgagttgtgaacctcttatatcgttacatattgttcttgggtaatgatggttagatgactaatattcacccctgcataggcattcttgggagtctagcctagggggaagtagtgataccgtcaaagttatgcctgatgaacatagtcaaaatatcgaaaaattatcatgtaacaaagttttaaaggcattagaactgggaggaaatttgatatgcaaaagagagtcgtccatctaattttagcaattattttcttaaccactacaatcgtacagtcatttggtagcgcattagtggtggctgtgaataaggagacggtgacagccaacacgacttctaagattgtgaacccacgaagcgcaattgaaggcgcgagctcagtttctgaaagcttagccagttcgttgcaatcacaatcgacaagcagtgcttcaacaagctcagatagtaagtcgagttcaaagagttctgattcagaatcgagttcaagtatttctgagaaaaaggaaagcgttaaatcgaacacgagtaaatcggtgattatttaaccacgatactggctttcagatttgactgatccgggcagtgaatatccagacttttcgattcctttatctggtcaaaacaacgttacaacgattgaagatgtagctaactggatgtaagctgattcctgagacaacttttaagagagggtataatgaataaatcatctctcaaaaggaaggaatttttacatgccaactcgttacgacaaagaattcaaacaaaacattatcaacctatataagcaaggcgaatcagctgcccaactggccagagaatatggcattggctattcaacagttcataagtggatccaaggccaggccaaaactcaatccggtaaatcgccagacaaaatcaaagcgatggaaaagcgactggcttcgctgtctgaggagaacgaaatcctaaaaaaagccctgggcttccttgcgcagaagtaaccaatatctttgattacattcaccaagaaagccatcaccaccaggtaaccaagatgtgccgaatcctcggtgtttccagagctcagtattatcgttatcgatcccccaaaccttcaaaacgccgggccgaagatgcgggcttgaaacaacggattctgcggatctttgcggaatttaagcagcgatacggtgttatgaagatccaccatgaattgaatctggaacttcaaccactgcagcttcggtgcagtccacgacggatttcccggctcatgaaggaactggatagccactccgttaccgtcaataagtggaaagcggcttcggcttccaaaaccaaggttgaacagcgtcccaacttgcttaagcaggatttctcgaccactggtttaaatcaaaaatggaccgctgatatgacctatattcaaacgaagcgtaatggctggtgttacttatcaaccatcatggacctgcactcacgacggattatcggctatttgttctcaaaaaagatggctactgatttagtcttaaagacccttgaaagcgcggttaaaaatcgaaccattactggggacctgattatccatacggatttaggatcacagtataccagcgatgattacaatcaacgtttaactgagctacatatccgccactcatacagccgtaagggttatccgtatgataatgcgccaatggaatcctttcacgcttccctcaaaaaggaatgtgtttatccagtgccggtctttgaagattatgaaactgccgttgccgtcctttttgaatatgtgcatgctttctacaataggaagagaattcatagttcactgggctaccagacccccttacaagttgaaattgcaacacttacgagccaaatggccgcctgatttaatgctttccagggttcaaataagttattatcgcgattaatgatttatttgagctgtggaaggtaaacgcggttctgaatgtctcttaaaatctgtctcaaatattgacttcaatccattgaacatcttagagcgattaaagcactataataaataaaaactatccacaacctgattgggaagggtgtggatagtttttttgtggaaacgtgctttttaattgcaacaccttccgcttaatctaaaatgagccttaatctcaaaagacgagattgaggctcatttttaattaatgctcagaggcaaatcgctttaacagcactctatgctttgtcgaagtagattgttgcgattgtgcctaggatgatcatagcgatgatgagtgcgatgggtcctagtagtgctgtggcggttgttagggctggccaggctggtgcgacgccggtttgggcaagaatccagatggcggcaatgacaacgccgagcacaccggcgtaaacgtattcgacgaagtgtgctaataggtagtgcattaatttagcaacaatcacagttccgatgacggccccaatgatgaacggtaagaggagcgcgacgcttttgaacgcttctgtggcttgtgtcaagcgtcctgtgacgaggtagaccattaagtcgagtagttgactgacagcgtgataaacagtgccatattgcttcacaatcatgagcatgattgacccagagacgcctgggatgagcatgagtgatactgagaagaagccggcaaatagtaacgtgccaaagtcttggagggtagtgagttgtttgatagcgatgtcggattcagattggtgaccaccaatctgggtgagtagtagcataattgcgccacagacgatggcgattaacactttttgccagttgagtccggcgagtctacgccagatgaatgggagactgccgacgacaagaccgatgaagaaactgtatgccgctagtggataagcggtgcataaccaaagaatgattttggtggagagtaagacgccgatcccagcgccaatcccgattggccataaaaagccaattgcttggcgccaatcttttttgaattgcgcgatagccgccagaagcggttcgtatagaccaacgataacggcgaaaatgctgccggatagaccaggtattacgagtgcgacgccgattagggcgcctttgagtgcgttaataagtggcataagcggttctcctttttatatgaggggacttttatttggtgggaattgtaacgggtgttgaaggtaatgggacaccagcttcattcaaggcttgcaagtaagcctgtaagaaagtacggttagtggcagcttgttcgccgttagtggtgtgcataacaatctggtaagcaaggacaccatctgcgagggtggttaccccgagaatcgtagggccatcttgtatttcaggatgtttgggcaccagttgcacattgacttcattgacggttgccgctaacagttgtaagtcggtgtcgggtaagatgcgaatgttaatcagaacacgcatatcattgcgggataggttgctgacgatcgagatattgcggttaggaatgaaatttaaggtgccatcgtaactttgaacttgtgtggttcgtaagccaatcgcgttgacggtgccttctaccgtaccaattttaaccatatcacccacatcgaattgttgttctgcgaggatgaaaaaaccggtaacgatgtcgttgacgaaaccttgtgcgcctaacccaatggctaaactgaagatcccagcgccggcaatcaaggtaccaacaggaacgccgagaacgctgagtagcgcatagagatagaagaaaatcacgaggtatgaaaaagcgttgaccatcaaagtataaatggtgttcatgcggttacttgagaaaccatcagttttgcggtattttctgaagctacgcttaatgatgtatttacctaagcgattgatgaggtagaataaagcggagagtaggataatttgaaacaatccagcaacgagggtgctgagtaatttatcccagtcaattgaagtgatgtagcgcataaaaatattggtctgtttctgaacagattcgaccggagttggtgcggccgctaataaacgtgtgaacatgcgtgaaactccttttttgtagcatgtctttagtttagcaaatgtcagaaaaaatggcacctaatatagtgaagataattgaaggttaagggaaataatgctattctagtctttaagagacaatgtaatagataacgaagtaggaggaacaaatcaatgacgggtggtcaaattgcggcgctaatcgccgcaggggcttttgcggtcctagttgtttttctaatagtgatgctattaaaagtcacaaaagtattaacggatgtttctaaaacagtaacggaagccaacaagagtgtcacggttgttactgagaatgttgatattttatctaaagaagtagaaggtttactcagcaaagccaacgtattgctagacgatgtgaacgggaaagtcgctgacttggatcctgttttcagagcggctggcgaacttggcgagagcgtttcaagtttgaatacggcaagtcgcaatttaacggaacatgttaccaacgttgggcggacaaccgctaaggcaacggtcgcttcgaaggttggcgcaagtgcattaagattttaccaaaatcgacgtcaaacaaaggataaggagtaattctcatggcaaaaaaaggacattttctattaggtgtattagtcggtggcgcagcagccattggtgcaacattaatgttaactcctaagacgggtaaggaattacaatcaaaattagtggacttaggtgatgatttaatggatcgcgcacaagactactactatttagcaagtgaaacagcagcagacttaaaagacgacgcaaagctacacatgaatcgcgtccatgattatgcaagtgattggcaagacaatgcgtctgatatcaaagaacaagcaaaagcacaatttgatgaaaaaacagcagacttgaaatcacaatttggcggcagccttgaagctagccaagaagatttcgacgatatcgtgatcgacggcaagagtgcatttggccaagccaaagacgaagcagccgccgctgttgaaactgttcaagaagaagtcactgaagataaataatcaatgaaaaagcccccgccaagcctgatttagcgggggcttttttgcttgtttgaattgacgactagtgcaaattttaaaagtcggtgttataatgaaagcatagaaaaagagccgtgcgacaacacgactcttctccacagtccgcttaagacggtggcaagtttttggtaaaaaataaccgtgactcgtcaaagtttagacggttatttttttggatggcaaattctataattaatccgaacagaaattaaaaagcccaaagcaatcacttacaatggtagtagctaattccaaccaatatagggagtgattactttgggtacatctactttatcacgttttcaacgtggcgcactagcacaactggtcaatgaggggaataaatcttaccaagtaatggctgacgccttaggcgtcgccaaagctacgattagctatgagttggaccgagttaaaccttatgatccagaattagctcagcaagatgcagatcgcaaaaggcggaattgcggtcgtcgttcgatgctgacggcagcattagcgactttaattaccaatcacttacgattaacctggtcaccagaaaccattgcggtcgcttataacttgagcactgcgtcaatttataattggcttaatcgtggctggctccccttcaaattgactgatctacccaatcggaatgtccgccagcaccgagtgagcgaaaatcgtgggaaatttacaagtgggacttccatcgaacaacggccaacaactgttaatcaacggttagcttttggtcattgggaagtagatacggtgctttctagtcgaagtgagtcacgatcatgtctggttacattcgtagaacgtaagacccgacttctatgggccatcaaagcccctaatagaacggctaaggctctaaacaccgcctttggcaagtttatgggggccttcggtccccaagtaaaatccattactgttgatcatggtaaagagtttgccaattatcaggccttagaacaggattatcagatcaaagtttatttttgccatccatattcaccatgggagcgaggttccaatgaatattttaatagacggttacgctggttcttcccgaaaaagaccaattttagccaagtaacgactgatgagatcctagcagcacttgaactaattaatcaacgaccattaaaaatacatcatcaacagactgccattgaaagattccgggcttgttcggattaaacttgtaatttgccagattaaatttcagaatctcaatgactaacatggtaaccgaaattgccaacatcagtgcgttgaaaaccgacatgttatcctttctcaaggtaacgcttaatcaacataggcatcaccccatttctgagcgttagccaccgtcataaacttactgttaggattactgtaacatagtttgaatggttaacgactagggattataaagttctttaggtagattgtaaaattaatccgaacgctgttcggacaaaaaagatcagcttcctttaaaatggtgtttaccacaaacccatcttttaggagctgatcttttgtctagtataacctattccgaacgaattaaaatcgaaaccttttgtgaactagggctgtccaatatccaaatgggcgttcggctgaaccgatcaccgtcaacaatttcttatgaattatctcgatgtcaaccttatcaggctgaattagcacaaacagatgccgaatacaagcgatcacgatgtggtcggaaaactaagctgagcgatgagttaaagcaaaaaattctcaaccatttacgtctaagctggtcaccaggaatgattgctcacgaatttaaactagctactaaatctatttataattggctaaatcaggggagaattggtttctccttgaatgatctacctgaacatggcgtacgccaacggcgtaacgttgaccaacgatccaaatataatcaatctttggggcgatcaattgaacagcgtcccatgatgattaatcaacgtaagcgcatcggcgattttgaactagatacagtcgttggtcctcgtgggcatagtaaggcagttttattaactttaatcgatcgcaaatcacggttcctttgggcataccggttaaaagatcggacgacagcgactgttaatgaagcactaactaagttcctaaccacttttaatggtccggtgcacagctttactgtggaccgtggcactgagtttagtggactagtatcacttgaatcacaatatggtattaagacctattactgccatgcttatacgccagctgaacgtggtagtaatgaacgctttaatcggaatttacgttatttttatcctaaagggactcgttttgagcacattagtgctcaagatttaacgacgacgttactccaaattaaccagcgaccgcttaaaatactcgactggcaaacaccgtatcaggttatgctgacaaatttgtccaaaaattcggattaaatttgcaatctacctttaaaacaaaaggcaggcgaaatcattttgtgatttcgtctgccttttttaattagtgctcagttgctgaccgcaattaagggcactcttattgaaacgtgctgtttcaaactgccttttccggttaaccaaaaacgcgaatcatgacgaaaagcgtcataatccgcgtttttaagttaatcctcaaagccaacccgtttgaatcagcactcttagaatgtttgtagttcttttgtcatgtgtgtgaaggcttctgatcctgtttctgttacgtggacacagtcttcaattcgaacaccggcaacgcctgggatgtagattcctggttcgattgagaaacacatgcctggcttgataatcatgtcgttgccttccatgattgatgggaattcgtgttctgaagttccaatgccgtgacctagacggtggatgaagtattcgccgtagcccgctttagtgatgacgtcacgtgcaatcttatctaattcagccgctgtgataccgggtttgattgctgcttgggcagttaagtttgcttcaagacagactttgtggatttcgagtgatttcgcatcaggtttgccaaaagcaacggtccgcgtcgcatcactcatgtaacccttatgcaatgtcccaaggtcaaagagcacgagggcatctggggttaaaatgttggcttcggggccaccatgggggttagctgcgttgatacctgattgtacgatggtatcaaaactcatatgcataacgcctttgcgcattaatgcgtattcgatttctgcaacgatatcttgttctgttttacctgcttttaaggcattgaaaccaacttcgaaagcataatcggcttcacggccggctgcttccattaaagcgatttcttcaggtgttttaattaattttaagttttccatgaaacgtgaagcgtcgcctgggaatgttgcgtctgggaattgctttagaatagcttcgtaacgttgaacaggaaggtcgtctttttcaagtgcccaacgtgtagggttcgcattccgtttcttgatttgatctgcgatgattgcgtatggatcttcgtgatcgagatagccgtaaacgtcgagtttccagccagcttttttagcagattcaacttctaattgtggtgtaaataggaatgggtcctgatctgcaaaaacaaagagggctaagacccgttctgcaggatcactttcgaaaccagtgaaatagaggatgttggttggattactgatgtaagccacatccatattattctcaccaagccaattttgtaattgggctaattgattattcatctaaagcacttcctttacaattgatatcactagtatatcacaaccaatgtaaacggtaatgtaaaccacaaatgaaaacaaaaatgtaaatttcatgaaaattagtgtaaaccgcttgcatttgctttaaatctctgttaaattaatcaagaagtaaaatgaaaactgctgaaaatataatctattttattttacaaatgaaaggaatcatttaatcatggaaaaacaaacaattacaatttatgacgttgcgcgcgaagccgacgtttcaatggcaactgtctcacgagttgtcaatggtaacccgaatgtgaaacccgcaacacgtaagaaggttcttgaagttattaaccgtcttgactaccgtccaaatgcggtggcccgtggattagcaagcaagaagacaacaacggttggggtcatcattcccgacgttagtgacatctattttgcatcacttgctcgtgggattgacgatgttgcgacaatgtacaagtacaacattattttggctaactcagatgaaaacaaccaaaaggaagttcaagtgttgaataccttattggcaaaacaagttgacggtttaatctacatgggccacagtatttcagacgaaatccgcgctgaattctcacgttcaaagacaccaatcgtgttagctggttcaattgatccagacgaacaagtgggtagtgttaacatcgattacgttgccgctgttaaagatgcaactttgaagttaatcaaaaatggtcatgacaaagtggcgttcgtttgtggtagcttgaaattcccaattaacagcaagtatcgtttatgcggttacaaggatgccttgaatgaagcaggcattgcttatgacgaaagtttaatttttgaaacagaatacagctacagtgctggtgaagcattgttcagcaaaatcaaagcaactggggcaacagctgctgttgtcagtgatgacgaattggcagttggtgtcttgaacggggcagttgatgccggcgttcaaatcccagctgaattcgaagttgtgacaagtaacaacacgaagttaactgaaatggtacgtcctaagatgacgtcaatctcacaaccattgtatgatatgggtgccgtagcaatgcggcttttaacaaagatgatgaacaaagaagacgtaaacgacaagacaatcctattgccatacagtatcgtagcaagagaatcaacaaaatagagtgctattggttgcggtcagcaattgagcattaataaaaaaatcccgttaatccaggttttaggattaacgggatttttagattaagcggaagttgttgcaaacaagagcacgtttccaccaatcaaaaaaggcctcagttccaaacgattttaaatcgttagaactgaggcctttttttagtttagttcgttgtctctgtatctgttggattggtattcgctgtataattcgtaccggttgtagtgccagtcgtagcagcagtaccagttgtgtttgctgtgtaattatttgtcgttgttgctgcggtgccactgcgacgactactgtagccactagttggatttaattcatcagcggtgctataggtaattgaaccatagccgttgttataacctaaatagtggttccagaaagtttcgtagttccgggcagaaccgccaatcccgaattcatagctagttgcttttggcgtccagttgttataaagcgaggtgacggttgaaccgttcaagttctgtgagctgccgttgattgaaaccgtgccaggtaattgaccagttaatttcaagactttgctgcttgtgaccgtacttggcttttcatgatcatcttccaaacgcatgaggcttgggttgatctgataaacgctgttggccaattttgaccagtatctttcattaatctggcttgagttgtcagttaagttacgaccagtactgtcataacccatccatgaagcgagggtgatcccaggggtactcccgataaaccagatatcgcggttatcatttgaagtcccggttttcccaactaagttgttggtattaaagtagagttgatcgtaaattgaagtagcagtcccatctgttaaaacgccggctaacatttggttcatgatgtacgacgttgcttttgaaaagacgcgtttcttcttagcgtgatgttggtaaacgacattaccggcgggatccgtaatcttttcaatcacgtaggcgtcggtatgttcaccttgatccgcgaaggttgaaaatgcactggcctgttctaagacgctgaccccatcactggtcccaccaagtgaaatccccagttgactgtattcatcagcggtgaggttgatgcccatcttactcatgtacttagaaggatctgttgtgttcttcaaagcgttataaaggttaacggttggaatattcaatgactgggctaacgcttcgtcagctggaatgaatttgttctggatcgtgccaccgtaatcggttggtgcgtaatccttgaagttggtcttgaaatcggccaacatcgttttagaaccaatcagtttctgatcgattgctggaccatagactaacaatggcttgatagttgaaccaggagaacgtttggtcaacatgtagtttgtttgtttgagtgagaaatcacgtccgccgacaaaagaaatcactttcccagtgcggttatctaacaagacgctcccgttttgaacaggggacgaaacggtcttttgtaaccccgtttcttcgtcagtaacggtatcggtataagtccgtccgaatgttgcgccctgttggtgaacaaccccttgcatggcatcgtaaatttcttgatcgatagtactgtgaatttgatagcctttagtgctgagtaattcagttgcttgtgtttcatattgtttgtagagatttggatctttgttaagtttggcagttgaaacattggcttctttggctaactgtttggccataatatcagttgcttgtgtttcaagtaagttataaacatagccataactcttcgttgtttcggctggatcggcttttggttggaattctttggttaagtcgactttcttagcggctttgtattcagcctttgtaatgcgatcgtcacgatacatccggaataacacggtatttttacgatctagaccatattttaagtattcaggatctttaagggtgccgtcttgatcatatggtgtatagacggaaggactctgtggcagaccagcaatgtaggcagcctcggctagagaaagatccttagcatttttgccgaataggcccaatgctgcttcttgaacaccagcgatattttgtcctttattgttacggccaagagtggcaacgtttaagtagtcttgtaagatttcttttttagtgaaatacttatcgacccgcaaggcgagcaagacttcggttgctttccgtttaaaggttacttgggaggttaaaacctgcatcttaatcaattgttgcgttaaagtcgagccaccggtttgtgaaccaaacccagtgacatcggaaataacggcccgcaagagtgctttggggacaaccccatcgtgtttatagaaatcctcatcttcggttgcaacaatcgcatcctttagataaggggacatctcatggatgttgatgggagtccgaattaagtcggttttgattgcgccgaacttattgttcttggcaaagtataaaccggctgcttgatcggtattatcaagttgttgctttagcacttgataactaggaattggttcggatttcattaacgcagcaaaatagcccgcgccaattccagcagcgagcgccatacagattaagctaattgagatcccatagagaaagatactcttaatggcttcaaagaagacgttaatcttaaaagagagtggtgattggctcaactcttggatgtaggctcttttttgttccttagttggttgtgcagaacgtttatcgggtaaatggagcaaatgtgcgagtctgtctttagcagatgtcaatagcgttgagaccttttgtctgctcgactggagcagtgctcgccatcgactggaacggtgctttggatcattcaaataataacgccaccttttttctcatactgtcccatattatataatagttcagcgcattatcatacccgatttcggatttgtaagacaaatgaaaaatatccagaaatgcacggcaatcaatgaatatagtgcaattggttaacaaatttgaatcagcagacacaaaaaggggggcgtttgctagcgattaaaagtaagcttttaacgaaatgccgtgaaaacgctaaacgttaggtataccaattatttagcgcgttttttagcgtcaaaaggcttgcaattgaaattttagccgtttataattggactataccaatgaacgacttgaatttttaaatgatgaggagataatcatgatgaaaattattaaagtgaaagatcaagtagaaggcggccaaaaaagctttgaaatcttcaaagaaggtttagcaaacaacgctaaagtattcggtttggcaactggtagttcaccaattaaattctacgaaacattagtggctagcgacttagatttcacaggttgcacatccgtgaacttggacgaatatgttggcttatcagctgatgacgaccaaagttaccactatttcatgaagaagaacttattcgacaagaaaccatttactaaatcatacttaccaaacggcttagcaagcgacatttctgctgaattaaaacgctatgaccaagtgattgctgataacccagttgatatccaaatcttagggatcggccaaaacggtcacatcggcttcaatgaacccggtactgcgtttgacagcaatacacaagaagtgcaattaacagaatcaacaatcaaagctaacgcacgtttcttcgaaaatgaagcagatgtaccaacaaaagcaatctcaatggggattggctcaatcttaaaagctaagaaaatcgtcttgttcgcatatggcaaatcaaaagctgaagccatcaaaggcacagtagaaggcccacaaacaacagacgtcccagcaagtgcattacaactacacgacgacgtgacaatcatcgtagacgaagcagcagcaagcttgttaagcaaatagagtgcgacagcaggcggttatgctctgaggattagtggcatatcgtgaatgagcggcaaagccgatcgttttcgatatgtaactaaccggaagagtatgcctgatggagcccgtttcaaaataagagtgcgtttgaaacgggtatcttctgagcattaactggatttgacgaattgacgatgaaatcgtcgatttgccaaatttggttaagcgcaggaagatgtttcaaaaagcccgtttcaaaacagagtgcgtagccagccgggtatatcccgaggattaacacaggatggcgaatgattgcgtcagcaatcgtttgacattcagggttaaccgcaaggatatggatgacggagcacatttccaccacaaaaaaatcccctacatcaaatcacgatgtgggggattttttgattgcattatttcaatgttgccatcactttagccattgcggcttgttgataggcgattgctgcttttttagcaaccgcttgttgttgatcagcagtcattgctggattggcttgcatagcagccatcacagcttgtttaccggcattttctgcgccagttttaagttgttcttgttgaccttttaatgttttagcgagttgtttagcttgaacatcacttagaacgaaccagcctttagcaaccttaaatgtgttgtgacgacttacgaattcgtggtcgttaccagaaattccgaaccagaatttagccgtattattttgataaacgcggtatttggtggttgtcactaagactgctttatcagcatttttttgaacactgttggttgtcttttcagtttgggttgctttgggtttactttggttggcatcggtccgataaagatagactttttcagtgccgttaccaagtgggtgatagagaagcattgacatgcccttcgcgtctgcgcttgaaacgagcgtgtgcgtcttagtttcggtcacagttttcattccgtaatgattgtgatcattttggacgatgaaaacgagtgaagcgataaatgtgagtccaaagatggtcattaagattggtcgccacatcttttgaccgaaaatcgatgaaaagaataatgcgagtgtgctgataacgagtgtaatgacgatcatgccttggcacccccattaatcgtagatttctttgaagagaggaagaatgtgatgatgaagccaatcacacagaaaatcacagcaacgatgaaggctgcgtgataaccagaaagggtggcatcaatcatcttatcgcggaaggccaatggtaatgtcttgaccatgtgtgtgcttggcatattgccttttgtaacactagaaagcacactgattaagatggctgtcccgattgagctggcaacttggcggaaagtattattaacagctgtcccatgactaatcaagttcattggtaaagcgttcattccggaagttgtgacaggcatcatcaccattgaaatcccaaacatccggacagcgtataacacaacgatgtagatgattggggtagtagctgttaggaagatgaatggcgcagttgcagccatcaataagaacatcccggtcattgctaagcgtttggcaccatatttatcaaaaatacggcccgtaattggcatcataatccccatcatgagggaaccagctaataacgttaagcctgaatggaaggcagattcgccacgaatgttttgaatgtatagtggcaagaccatttcggcaccgaccatcgccatgttcgtcacaccacttaaaatagcagcaattgtgaagacaggtgatttgaaaacgcggagttccaagaatgggttttccatcgtgagttggcgccagatgaataaagcaattaccacaacgccaattgctaaggttgtgagaacgagcgcatcgccccagcctttatcgccaacttctgagaagccataaagcaagctcccgaagccgacagttgataaaataattgaagggacatcaattttaggttttgaaagttgaataacactcttcatttggaaactagcgaggactaagacgagaatcacgattggaataatcatgccgaataaaacacgccagttgtatgaatcgataatccagcctgaaagggtaggccctaaagcaggtgccaggccgataacaatcccggccatccccatggctgttccccgtttttcaggtgggaagatggtgagcataatggtttgcaaaatgggcattgaaatcccaacaccagcagcttgaacaagccggccgattaatagagttgcaaacgagctcgttggtgcgatgtaacagataatagtcccgattaagaagacagtcattgctgacatgtagaggacttttgaattgaatcggttaattaaccaagcactaatggggatcataatcccgttgactagtaagaaaccggttgtgagccattgaacggctgaggtggacacatcgaatgctttcattaatgtggggaaagcagttgataaaatcgtctggttcaagacggtacagaaagtaccaatcaataagaccaagactaagactgtccgattatatggtttcccatgaatatctaatggtctagcgtctgacaagataaaaatctcctttgtgtgtttttgttgatgcgatttattagtttagacgcatttggtatctttgtcaagtaagttgacaaatgtgttatttaacttgacaatcccaatagattatctataatgaaaaataataataggaatggagtggggacttgcaaaaagacctttttttaaagttaatagatacggatcgattgatttttgggattagtgaagtttgtaaaatggcgggggttacaccgcgtcaactccgctactgggagcaaaaaggatacattaaagcgcgtgaattggatggcaataaggcccgcgagtacgacgcgcaaacaatgattaaggcgatctttatcaagcatttcttagatgaaggctacacgctaggggttgctgtacagaaaattcaaaaacacatggataacatgaaggttgttcgttcgataattcgggaacattttgagggaattgaagagattgatgacgaaatggctgttaatctcggttacttcgatgaaacaaagcaacaaatcttatacgcaattgtcaaagatgggcattcaacgtttaagctgatgcctgctgataaatgaaggcaatcaaaaaaacggtccaaagcgattaagctttggaccgtttttttgattgctaaatgtgttctatcagccatatccttccggttaaccctgagccgcaaacgattgctacgcaatcattcacaactttgtattaatcctcggtggatacccgacttacgtcacactctaccttgttaatctgtaaattgcatctgcatagattgcaatggcattcatgatatcttcaatgtgcatatattcatttgcttgatgcatcacattttcgcgttcttctggtaaggcaccgaaagcaacaccacgttctaagatacgaccatatgtgccaccaccgataacttgttcgtgacctttaagaccagtttgttcttcgaagacgcttaataatgttgcaaccaatggatcgtcaccaggcacgtaatgtggttcttgtgcatgaccgtcaattgttacgtcagcaagatcactaagtgtgtttgctaaaccgtcgcgtgtgctttcagcagtcacacctttaggataacggacgttcaagagcactgttgctacaccatcttgtgtgtagttgaagactgcaggacatgctgttaagtcgcccatcacatcatctgtgtggttgatgtttaagaggtgcccacgtgaatcttcgtgcattaagcgggcaattgttccgatgtagttgccacctttagtatctaaggcaaagtcagctaagaaagttgccaagtgtgttgcagcatttacgccggcttttggttcttgagcatgtgaacctttaccgattaagtcgatgattgtttggtcaccgtcagttgtgattgtcccttgtaacttgtggtcggcaacataggcgtcaaacttagcttggaaatcagctggcattgcacccgttaagatggctttagctgtttgtggcaccatgttggcgcgtaaaccagatttgaagctaaccaatgtcatatcgccatcagcaccgtcaactggtttgaaagtcatgaggtatgacacaatccctttttcaccattgatgattgggaagtttgcatctggcgaaattgcaaagtcaggttttggttcaacttcgaggtaacggttgatcccaacccattcactttcttcgtcagtcccaacgataaagtgcacttttttgtttaattcgataccgttgtcttttaataatttcaaagcataatatgctgcgattgaaggccccttatcatctgatgaaccgcgggcataaatcttaccgtctttgatcactggttcaaatgggtttgtttcccaaccgtcaccggcaggcacaacgtccatatgacctaaaatcccgaatatttcgtcgccactaccgagttcaatgcgacctgcaacgttttcaacattctttgttgtaaaaccgtcgcggtcagcgattgctaagaattgtagcaaggcatcgcgggggccagggccaagtggtgcgtcgtcttctttatggtcaacgtcgcgcgcactattaatcttgagtaaacttgttaagtcagcaagcatttgatccttatactttgctgcttcttgttgccaattcaatgtcattgcagtcccagctttcattgttaaattttaaccaaaaaacggttaattaattattaatctattcacattttagcatattattacaaatttaaaaagcgcttgccattaaaaaataaaaggttcacaaagtctccatgaaccctttaaggttagtgcttctttaaaatccgaagtgcgtttaaaatcgcgattaacgttaccccgacatcggcgaaaacggcttcccacattgtggcaattccaaaggcgcctaataataagaagatgcctttgaccactaatgcgaaaatgatgttttgccaaacgatgcggcgggtgtacttggcgatcgaaatcgcagttgctaattttgtcggttcatcggacatcaagacgatatcggcagcttcaatagcggcgtcagaacctaacccgcccatagcaacgcccacgtcggcacgggctaaaacgggtgtgtcgttgattccgtcaccaacaaagacgatttttccgttggtagcgcggtcttctgtaagtttggcgacggcggccactttatcttgcggcagaagttcgctttgatacttatcgatacctaagacggcgctgacttgttgcgcaacgggttggttatcgccagtcaacataattgtttgatgaatcccggcgtgttttagctgcgcgacagccgtttgtgcatctggtttgacggtgtccgcaatgacgatataccccaagtagcggttgttgtaagcaacatggacactggtgcccacttcactaggtgtgagtgttgcgatgccactggcttgtaaccaactagccttaccagcttgtaaaagttgtccgttgagttgcccgctaatcccgtgaccagcggtttcttggacgtcagataacgtctttgtgagtggcgtttggttagctgctaaaatcgattgaccaattggatgggtcgagtgttgttcgacaagggcagctagtgctaaaagttcatcaggttgttgatcgaccgaatgaacggtggtgacgctgaaactaccttgggtcaatgtcccagtcttgtcgaaaacaacggtttggacatcgtttaaagcttcgagataattactccctttaaccaggatgccgtttttagaagccgttccaatcccagcgaaaaagccgagtggaattgaaatgacgagggcacatggacaagaaatcactaagaaaatcaatgcccgatagagccaatcgccaaatggagcaccgaataaaaggggcggtacaatggccatgatggctgcaatgccgacaacaattggtgtgtagactttggcaaaccgcgtgatgaagttttcagtaggcgctttttgactgcttgcattttcgacaaggtctaaaatcttagcgatggttgaatcagcataaggtttcgtgacttcaagcgttaataaacctgattggttaatcgtcccactgagtagttcatcaccaggatgaaaggcgcgaggaacagattcaccggtaatagctgaggtgtccacgtaactgtcgccggtagtaatcacaccgtcgagcgggactttttcccctggtttcaccacgatgtgttcgccaacctgaattgcttcgggtgcaacaacttcggtggtgccatcagccgctaaccgattggcgatggttggtttaattgccactaagttagcaattgagcgccgggaatgattaaccgctaatgattggaaatattcaccaacttgatagaataacatgacaccaacggcttcggcatattgtccgattccaaaggccccaatggttgcaattgacattaagaaatgctcatcgaaccattcgccgtggagaatatttttgattgcggtccagacgatatcgtagccgatgactacaaaggcagctaggagcaacgtggttttagctggcgcgcttagagggacaagataagaaatcgccaagcctaaagagctgacgagaattcggatgagatcataattaatcgcatgttttgcgggggatggttctggggttggtgattgttgaatccccacatctggttcaatggttggcaaaagagtagcgagttgttgttcgaattccgtaacagcttcttggccggtcagttcatagtttaatttttgagtggtgaaattgacggagcaacttttaacgttggccatcttgttaacgttcttttcaattttagtagcacatgcggcacaatcgatgccggttaattgaagttgtgccatgttatttaggcctccttgttgagtgaaaagctaaatcgtaatctttactaaataaacaaacatatgagcatatattcatatgttgactataagataccaccaaacacgatagaatgcaatcgagatgatgggtttgggacattaaaaaaagcaccgaccaaagtgaatttgatcggtgtcaataggatccttagtgttcgttgacgtgggcgataacttgcgaaaagatattgatgacatggttgtcagctaatgaatagaaaacttccttgccttctttacgactttttaccagtttcgcttgcttgagtgcacgtaattgatgtgaaattgaggattgcgacatctctaacacactgacaatatcgctcacccgcaattcggattgaaagagggcgtacaagattttagcgcgtgttttatcgcctagtattttaaaaagaattgagatgtgatcaagtgtttcttcctttggaagagtattttggacggaacgaatcaattgttcataatcggatgtcataaaaggtgacctcgttagaatttaatggtagttagttgtagagaacgggcaaactggttaaacagttgtgtgtcgactggtggttgttggggcaattgcagtggcagtgctgggttaatcagtaagttggttggccgcaattgttggggaatttcacggtaaaagtgggttaccatcagcgattggtttgggttgaagtcgattaatgcttggcgactcttgaaccaaccactagcgactttcaaccagacttgattaccaacatagcgcactcctaaaatttgctgttgtgaattggcactaagataaccggttgtctgggtggggtgtagcggattattccaagtagcgacaatgttcgcagttggtttaatctgcgccgttttacccaccaataaagcagcggctttcgctgtttcaccgacgttgatgctgtcgctgaggacaaagcggttagtgccaatgcggtagtaagtttgatcggcaattgtaacggcttcggtgatgttgtagatatggcccgctttagccggctttttattgagggttggttcatatggattttcaacggtggggaggtcttgaacgtcattgacttgcccaattgtgtcgatggcttcactttctgcttgatcctgtgcggcctgatagtggcgtcccagtgccggatagttcgtgaccacgccgtcgacatttaggttgactaaccagttccaagtcgcttggttttcagacatctcattccagacatacactttttgatggagataatggagctgtttaatgatggttggggtgacgagggatgatgagatgttaatcccgtcggcgtatttaaaactctcgaatgagatccgctgtaaactgccaacgataaaaatgcggggaatctctggcattaaacgttgcatgttttgcagactagcgagggaaaaggaatggaccataacgcggtcttgcatgtgatattgttgaatcagcgccacgagttttgcttccatgtcctgcggatttccctttttggttttcttggtttcgatgaggaatttcgcatttgggttgttttgatagtgctcaaataattgatcgacgctgtgtggtggttccccgttactcattttgagttcactgagcttggcaaaagtattttgcgaaacaatcgcatcggtccccgtgacgcgttgtaagttacggtcgtgggagatgactaagacgccatcttgagattcgtgtaaatcgagttcgacatagttagcgccttgcgaaaaggccatgtcaatactttgaaatgtttcttcgggtgcgttgatggggtcgccacgatgagcgacaacggtaaaaccggttaaaaaccagaaacaaaggcttgttaatactaaaagcccccatcgtgaatgttgctgtgacaaatcaatggcctcctcaattgataaaaactactctttttaagataccattattcctttcaaatgcctacgattgttacagaactttaaagaaacggataaataaattaaaaataacaattgacaacgcttacattaggcggtatattatgtttgtaaggtacttatgcaattacctttttatcaattctctttctctcttatgccaaccactatctgcgggtagtggtttttttgtgtacatattggtagaataaacgtaactgaaatcggattagaataggaagtaacacaatggcggagaagtaccaaacatttgatattattgaagaaattacgcgcttagatggcacaacgtattatgaattggctaacatctttatgaatgggcgtgccgaactagcggctaaccggggatttattaagcaagtccggattttacaactcaacattccgcattcgaatgcggtccaaacttacgaagcttacattaatgaacgttacacaatgcctgcggttgattttgaccactgggaagaatgggaaaaagaagacggcgcagttgcgcaagcctttcaggagattttaaaagcaaatcatattggttaggtgggattgtgaatgacttatttcacagcggatacgcatttttttcacgccgaattattaggtaataatgattttgcgccgcgtccgtttaaagatgtagctacgatgaatgcaacgattattgctaactggaatcaacgggtgcaagctgacgaccaggtttatttgttgggtgacgtcgcaatggtgcccaataagccgagtgcttttgctgaagtcgctgctgtgttagagcagttgaatgggcagctgattattattaaaggtaatcatgataaccgtgcttttttgaaatatttggcgaaacatgatgcgggattatcagctggcaaggcgcattatcaatttgctgatgtcggtgagctaattaagatcaatcaccatcagtattttttaacccactatccgttattattgggaaaggtccaacagacgttcaacttgcacggacatattcatcattatatgttgccgattgcagagaatatcaatgtcgggattgatgcaccagagcgcgaattattacctgaacgggtgccgtttggaacaccccttgcggcaaatgagattgaaatcatttttgaacgcaaacaagccgcgctggcaaaccccagccacgactagctgaagggagtaagcaaaatggaaacaattcatattttacacacgaatgacttacattcacattttgaaaattggcccagaatgcggcgcttcctcttagaacatcaagcagcataccgaaagcaaggggatacggtcttgaccttcgacatcggggatgcaatggatcgtagtcatccattgactgaagcaacgaatggtcagattaataccgagttactcaatcaaattgggtatgacggagtaacgattggaaacaatgaaggaatcggtaatagtcatgctgatctggaacatttgtatgataaggcgaatttcccggtattactggctaatctgtatgaacaagcaacaaacgaaaggccagcatttgcgcaatcttaccgactaatgacgaccgatgctggaacgcgggtagcaattattgccttgaccgcaccatttttcttaacttatcggccgaatggttgggaaccgacgactgtcagtgaagagttgccgcggcaattagcggcgattgaaggtcaatatgacatcttaatcgtcctatcacatcttgggattacgactgataagtggctggcggaacaattccctgagattgatgtcgtctgtggtgcgcacacgcatcatcttttagaagaggggctgctggttaatcaaaccttattgacggctgccgagaagtacggtcattaccttggtgatatcacgcttgaactggatgatcagcaccatgtgatgcataaaagtgctcggacggttttaaccgcggacttaccagttgtgaagactgacgcagcagaaattgaaggctacctgaaaaaggggcacgcacaattagccgccgagcatgttgccaagttgccacacgcttttaaaatcaacgcaattggtgaatcagaaatgatgacgaccggtttaaaggcaattgaagaagcgaccagcactgaagctgccgtattgaatactggcttgttcttgcaagatttgcaggctgggattgttactaaagatgatttgcaaactcaattaccgcatccaatgcatctgattaaagtgacgctcaaagggtatgatttgtggcggatggtgcttgaaatggagaaaaaccggctctttttacgcaagtttcctattaaagggatgagtttccgtggtaaaatctttggagacatcgtttatgacgggatagcggttgatatgaaattgcggcgcgtcttttggcatgggcaagaaattgatccagaagccagctatacgttgacgaccgtcgatcattatctattcattccattctttccaacaattgagattgttggcgagaccgagatcgtgttccctgattttctcagagacgcggtcgctaaatatttaagtaaacattatcccttataagggaagaggaggttcgctgtggcggatacgaaaaacagtcccaagattgccaagaaagtgaccaaggcgattgaaaaagaaatgatcgcttcagccaaacaaccggaagtgccacaacacgttgtcatgaagactgaaaccacgcttgagattgataaatgtgcttatgaagtcgttgtgaactatcgtgaaggcttcgacgctgaaaagttgaacgaacgctataatgaagtgttggctaagtacgattatattgtggctgactggggctttgaacaactgcgtttgaagggcttttacaaagcaaccaacaaacgcgctaataaagatcaattaatcaatacgttacaagattatctatacgaatactgcaactttggttgtgcctactttgttttggaacgtcaaggcaagccaatcattaagaatgagaatcggcggagtaatcgccaacgtggtcagcaacggcgtcggcgtcaaaagccaggttttacagaacggaaagtcaccgataacaagcaaaaagtgactaaagaacgccctcaaaaggcggtaaccgagaatcaaaaatcagttaataagcgtcattttaagatccgtcctttggaacacaataaaaagtaaaacgtaattggagttagacaactatgacaaacacagattatgcagggtatttaattgatttagacggcaccgtgtatcgcggccgtgatcggatgccagaagccaaagatttcattgaacgcctacaagcaaaacaaattccgttcatgtttttgacgaacaacactacgaaatcaccagctgctgtgattcagaatttggcggataaccatgacattcatgcgacagttgaccaagtgtataccccttctttggcaacggcgcgctatctattgaatttaaacggtggtacagcgaatggcaaaacggtctacgtgattggagaactcggtttgaagcaggctctatcagatgccggttttaggaccaatgaattcgatccagactacgtggtagttggtttggattatgatgtgacttatcacaagtttgaattagcaacgttagcgattaagcgcggtgcattattcatcggcaccaatgcggatacgaatttaccaaacgaacgcgggctagtgccaggtgctggttcagtgattgcgatggttgaacgggcaacgcaacaaagtgcactctatatcggtaagcctgaaaaaatcattatggaaatggccttagagcaattcggcttgacgaaggaacaagtggtgatggttggcgataactacaatacagatatcaaggctggcttgaatgcagggatggatacgttgttagtttacactggtgtttcaacgccagaggatgtggcaaaagaagccttgcaaccaacgcatatcattaacgacttaaccgaatgggacgtttaaagcgggttagaagtaccactagttgggcggcgttgtatttggcgttagtcagcagtgcgattttaataacgttattgttaagctgggcactttatccgctagtgagtcactacctcgatctagcgagtcaacgggaattaacgcaaccgcggctgatgatgaactttaaccggttaatgggctacttacttgtgccatggcaaccacgcttacaactacctgactttccaatgtcattggatggtcggcaacattttgttgaagtgaaacgcttgtttggtttagcagtagttatttggctagtaacgattggagcggcgattcagcattggcggagtcggcgcaagaccaatcgggtttggcaatacgtccgcccaatgcaagttgctcttgtggtgccacccatattagggtttattgctagtatgaatttcgatcggtttttcattacgttccacgaattattgtttcgcaatctgaactggcagtttgatccaatcactgatccgattatcttagtgttaccggaagtctattttggcctttgttttacactcttcttcattttgttagagggtagttttgcttggctgttatggcgcggtaaacgtgcgctataacgtttggctttttattaagaaaatgcaaaagtgattgctttgatgcatggattcggtatcctaataagggatatatttttaaattgaaaaagagtataggagaaatcgcatgacgcagttaattgattttgttttacatattgattcccacctggtcaacattgttaatcagttcggcaactggacctatgtcatcttgtttgccattatctttgttgaaaccggggcggttatcttaccgtttctaccgggggactcgcttttgtttgccgctgctgctttggcagcccggactgataatgacttgaatgtctggctgtttgctgccttgttcttaatcgcctcaattgcgggtgattcattgaatgaacaaattggccaacgggtcggtttagccgccacgaagaatcggttcttcggcaagtttatcaataccgagaaaattgaagaggcgcaggtcttctttgataagtatggtggtaaaaccattgcaattggccgtttcatgccgattattagaacattcgttccatttgttgccggtgggagccagatggccttcatgaagttcttccgttacgacgtgattgggagtatcttgtgggtgacactctgttgcggagctggttacttcttcggaaacattgctgttgtgcgtgaacatttctcactcgttgtgttagggattatcggggtctcattgattccgatggttatcacagcggttaagagtcaaatgaaaaaaaataatgcttaataaaatactaaaaagtcctgcatcaacggttaaaacgttgatgcagggcttttttaaaacgtgctttagctagcaacttcttccgtttagccacggtttgcaaacggtcggctgtgcggctcattcactaaccgatgctatactcagaagctaaccgctagttaaagcactcttatcgaaacgtgctccataagccaccttcttccggttagctacggccagtaaatcatcgactgcgtcgctaatttactggactaggctaatcctcagaaggtaatcgggcatattgcgcactcttacataatggacgtgctgtgtagtggttggcgtttttctgggtagagattcgttagtaactcagtcacagccattggtgcttcaccaaatccgctggcaattaacttcactttaccagggtaggtagcaatatcgccgatcgcatagatgttcgggatgttcgtctcgagttgttggttaacagcgacttgatggtggtccaatgttaatccccaatcacggagaattcgagtatcagagataaacccatagttaacaaggagtttgtcaattgttagctgctcttgatcggttgatttcatcttgtttaaagttaatgcgagttgttggttcatttcggtcaaactatcgattaaaaacggcgtcttaatttggacagttgattgtttgagtgcttcaacgctactttcaagcccgcggaattgatcccgacggtgaattaaatagacttgtttagccactttttcgagcattagtgcccattcaatggccgaatcaccaccgccagcaacggcaacggtttgatctttgaactgcgccatttcttttgcgaagtagtgaatatagtgattttcccattctggatcgtaatcgacagcgagttttcgcggtgtgaaagccccgttcccaacggcaatgatgatgcctttggtgcgtgtcgtgcccttcgttgttttaagaacgaaagtcccatcttcttggggttcgataccttgcacagcagtggataattgcaaggttggttggaaaagtgccagctgttcaattaagttttcggtgagctgtgcaccagagataccactgaaaccagcgacatcatagatttgcttttctggatagagtgttgcgacttgaccaccgagttcggggagactttcgataatctgaacatcggccttgcgcataccagcataataggcagcaaacattccgacaggaccgccgccaataatggtgatatcaaagagatgatttgaatcaagcatgagataacttccttaatagtagatttcttaaattagtatactagaaaaaaataaggaaagcatgtttaatgaaataatcgtagtaatttatgaagcaattcgctatcataatgattgtgagtcaaaacaaggaggacgattaaatgacatatccacaattagaccttgcaaactttgcagggccaacagctacttttgacacaaaccgtggcgaatttacagtagcacttttccaagaccaagcacctaagacagtagaaaactttatcggcttagctgaaaaagattactatgacggtgtgattttccaccgggtcatcaacgatttcatgattcaaggtggcgatccaaccggtactgggatgggtggcgaaagtctctggggccaacctttcgaagatgaattcaaccaagaagtctttaacttaaatggtgcattatcaatggctaatgctggtcctaatacaaacggcagccaattcttcatcgtaacaaacgaacatatcaaccaaaacatgttgtcacaaatgccaggtgctggttacccagaagaagtcattacggcttatgaaaagggtggtacaccttggttagattttaaacatactgtatttggtcacgtcttgagtgggatggacgttgttaataagatcaacgctacagaaacaggaatgcaagacaaaccagttgaagaagttatcatcaatcacattacgattaatctttaattttaattgaagaggtgttttagatgctagtaggtggaattgaaggagggggcacgaagtttgtctgtgccgtaacagatggaaaaaatgggatacaagaacgaattagtatgccaaccgagacgccggaacaaacgatgccacggttatttgaatattttgatcaattcgatcatttagatgccattggtttggcatcgtttggcccaattgatgttaacccgaaatcaaaaacatatggctcaatcatcgatacacccaaagcagggtgggaacactatgatatcttaggagcaatgaaagctcattatcctgatacccagtttgcttttacaacggatgtgaatgccgcagcctatggtgaattgaagatgggcgctgctgatggacttgatagttgtgtttacttaactgtcgggacggggattggtggcggtgttgttgaacacggtcagattttacaaggttacagccatcctgaaatcggccacatgttaattcggcaacaaccagaagattcatacgaagggacatgtccttatcaccacaattgtttggaaggcttagcagctggtccagcaatcgaacgccgttggggcaagaaaggccacttattgccggctgatcatcaagcatggcaaatggaagctgactatttagctcaagcttgtgtaaatattgctttaatgctatcgccagaacgaattgtcttcggtggtggggtgtcgaaacaagcccaactattcccaatgattcgtgaatcctttaaacgtcaaatggcaggttatgtgcaaacgcctgaccttgatgactacatcgtgcatgttgcattaggggatgacgctgggattactggggcacttttactagcagctgatcaactttagttaaatgagaacctgagggatgtttcctcaggttctttttacatattatagaaggaattgtataaaaggtcttagccgatagcttgccttttactaactggaaggcttaaaatagataggaatattgaaatggaggaaaatatgggttatcgaattggacaaaagattacaggtactgtaacaggcattcaaccatatggtgtatttgtttcattagatgcaacggtccaaggcttaatccacatctcagaatgtggtcatggttttgttaaagcgttagatgaacagtttaaagtcggtcaagtgttagatgtattagtgttagatatcgatgaatacacacataagattagtttgtcgttacgtgcgctacataaagcacaagatttagcaccacagcgtgctaagaaacactattggacaaatcgccggattcatattgggtttgcgcccattgcagaacgattaccaagatggactgaagaagcgatagaagacttgaataagggtgagaatgtatgagtgctaaagtagccggaacgattatgtataagacagagcaaggacaatatgattttttggtccaaccacaagttgatgcttcttataagatgctggtgaccaataagcaagatgatcaaacaccacttgctgctgtattaattgcaatccaagcacagctaaatattgatgttaacgaattgagattgatcaatttagcgaatattaaccttgaaggtgagaacgtttcgttctttgtctttcagtggggagctcatgagactgatttttataccgaacaattgagaataattagtgaagccggttttcgatttgcgaaccctagtgagttcacgaaattactggataagttagaagtcacgagtgttccgcacttgaattagttcggacaatcggtgaatatctattcaacaatgtacgcttttgaaactttttatatttttattcaaaaaaaagtaaacaatcgcttgacgatgtcttggattgttggtatagtattctatgttgtcagcgagagaaaagctcattgctaacgaaataacgggtcaaacgagattgaataaatattcaaaaaatatttataaaaaacgcttgacagtgttcgttagaaatgatatattaattaagctgtttcaacacagtagatctttgaaaactgaacaaagtttcgacaaaccaaatgtgtagggtcgcccttcggggcacaaaacatatttgcaaagtcaatttcgctagcaaataaattaagtaacaaaacaagagctacaaacttttaatcgagagtttgatcctggctcaggacgaacgctggcggcgtgcctaatacatgcaagtcgaacgcactctcgttagattgaagaagcttgcttctgattgataacatttgagtgagtggcggacgggtgagtaacacgtgggtaacctgccctaaagtgggggataacatttggaaacagatgctaataccgcataaaacctagcaccgcatggtgcaaggttgaaagatggtttcggctatcactttaggatggacccgcggtgcattagttagttggtgaggtaaaggctcaccaagaccgtgatgcatagccgacctgagagggtaatcggccacactgggactgagacacggcccagactcctacgggaggcagcagtagggaatcttccacaatggacgaaagtctgatggagcaacgccgcgtgagtgaagaaggttttcggatcgtaaaactctgttgttggagaagaacgtatttgatagtaactgatcaggtagtgacggtatccaaccagaaagccacggctaactacgtgccagcagccgcggtaatacgtaggtggcaagcgttgtccggatttattgggcgtaaagcgagcgcaggcggtttcttaagtctgatgtgaaagccttcggctcaaccgaagaagtgcatcggaaactgggaaacttgagtgcagaagaggacagtggaactccatgtgtagcggtgaaatgcgtagatatatggaagaacaccagtggcgaaggcggctgtctggtctgtaactgacgctgaggctcgaaagcatgggtagcaaacaggattagataccctggtagtccatgccgtaaacgatgagtgctaggtgttggagggtttccgcccttcagtgccgcagctaacgcattaagcactccgcctggggagtacgaccgcaaggttgaaactcaaaggaattgacgggggcccgcacaagcggtggagcatgtggtttaattcgaagcaacgcgaagaaccttaccaggtcttgacatcctttgaccactctagagatagagctttcccttcggggacaaagtgacaggtggtgcatggttgtcgtcagctcgtgtcgtgagatgttgggttaagtcccgcaacgagcgcaacccttattactagttgccagcatttagttgggcactctagtgagactgccggtgacaaaccggaggaaggtggggacgacgtcaaatcatcatgccccttatgacctgggctacacacgtgctacaatggatggtacaacgagtcgcgagaccgcgaggtttagctaatctcttaaaaccattctcagttcggattgtaggctgcaactcgcctacatgaagccggaatcgctagtaatcgcggatcagcatgccgcggtgaatacgttcccgggccttgtacacaccgcccgtcacaccatgagagtttgtaacacccaaagccggtgaggtaaccttcgggagccagccgtctaaggtgggacagatgattagggtgaagtcgtaacaaggtagccgtaggagaacctgcggctggatcacctcctttctaaggaataatacggaaaaccttgtacatttgcgaagtcgaaactttgtttagttttgagaggtctactctcattgaattaggacgttttttgggcctatagctcagctggttagagcgcacgcctgataagcgtgaggtcgatggttcgagtccatttaggcccattgtactaagaattaaatagtaccaacacgggggattagctcagctgggagagcgcctgctttgcacgcaggaggtcatcggttcgatcccgttatcctccattgatgacaatagtcatcgaaactttgttctttgaaaactggataataagtaatatattagttttaaaagccgagaaaacattgcgttttaaagagttttttaatagaaatatgaattagttcatatcgctaaactcaaataataaccctttaccgtaggtaaagttaggttaagttataaagggcgcacggtggatgccttggcactaggagccgatgaaggacggtactaacaccgatatgcttcggggagctgtaagtaagctttgatccggagatttccgaatgggggaacccaatacctttagtcgggtattatcattaagtgaatacatagcttaatgaaggtagacgcggggaactgaaacatctaagtacctgcaggaagagaaagaaaaatcgattccctaagtagcggcgagcgaacggggaagagcccaaaccaagaagcttgcttcttggggttgtaggacagaacattggagttaccaagttaagttgtaatcgaatcagctgggaagctgagtcaaagagtgtgataaccacgtagattaaacaacttaacctccgttctggatcctgagtacggcggaacacgtgaaattccgtcggaatccgggaggaccatctcccaaggctaaatactccctagtgaccgatagtgaaccagtaccgtgagggaaaggtgaaaagcaccccggaaggggagtgaaatagatcctgaaaccgtgtgcctacaattagtcaaagctcgttaatgagtgatggcgtgccttttgtagaatgaaccggcgagttacgtttatatgcgaggttaaagtgaaaagctggagccgtagcgaaagcgagtctgaaatgggcgagtgagtatatagatgtagacccgaaaccaagtgacctacccatgtccaggttgaaggtgtggtaaaacacactggaggaccgaacccacgtcagttgaaaatggcggggatgaggtgtgggtagcggtgaaattccaatcgaacttggagatagctggttctctccgaaatagctttagggctagcctcggaatattggatcatggaggtagagcactgtttggactaggggcccgtcatgggttactgaattcagataaactccgaataccattgatttagttccgggagtcagactgcgagtgataagatccgtagtcgaaagggaaacagcccagatcaccagttaaggtcccaaaatttatgttaagtggaaaaggatgtggcggtgcacagacaactaggatgttggctcagaagcagccaccatttaaagagtgcgtaatagctcactagtcgagtgccgctgcgccgaaaatgtaccggggctaaacataataccgaaactgtgggtggacacgtaagtgtccgcggtaggagagcgttctaagggcgatgaagctagatcgtaaggactagtggagcgcttagaagtgagaatgccggcatgagtagcgaaagatcagtgagaatctgatccaccgtatgactaaggtttcctggggaaggctcgtcctcccagggttagtcgggacctaaggcgaggccgaaaggcgtagtcgatggccaacaggttgagattcctgtactagtttattttgtttgaacgatggagggacgcaggaagctaaggaatgcacacgactggaaatgtgtgtctaagcaacaagtcttgagttgagtgaaatgcttgattctttaaggacaagttgtgatggggagcgaaattaagtagcgaagttcctgatgttacactgccaagaaaagcttctagtgagaaataaactacccgtaccgtaaaccgacacaggtggtcgaggagaatatcctaaggtgagcgagtgaactctcgttaaggaactcggcaaaatgaccccgtaacttcgggagaaggggtgctgaccgtcaggtcagccgcagtgaataggcccaaacaactgtttatcaaaaacacaggtctctgcaaaatcgaaagatgacgtataggggctgacgcctgcccggtgctggaaggttaagaggatgagttagcgtaagcgaagcccagaattgaagccccagtaaacggcggccgtaactataacggtcctaaggtagcgaaattccttgtcgggtaagttccgacccgcacgaaaggcgtaatgatttgggcactgtctcaacgagagactcggtgaaattataatacccgtgaagatgcgggttacccgcgacaggacggaaagaccccatggagctttactgtagcttgatattgagtgtttgtacagtttgtacaggataggtaggagccgtagaaatcggaacgctagtttcgatggaggcgttggtgggatactaccctaactgtatgaccactctaacccgcgccacttagcgtggcgggagacagtgtcaggtgggcagtttgactggggcggtcgcctcctaaagtgtaacggaggcgctcaaaggttctctcagaatggttggaaatcattcgtagagtgtaaaggtataagagagcttgactgtgagattgacaaatcgagcagggacgaaagtcggacttagtgatccggtggttccgtatggaagggccatcgctcaacggataaaagctaccctggggataacaggcttatctcccccaagagtccacatcgacggggaggtttggcacctcgatgtcggctcatcgcatcctggggctgtagtcggtcccaagggttgggctgttcgcccattaaagcggtacgcgagctgggttcagaacgtcgtgagacagttcggtccctatccgtcgcgggcgcaggaaatttgagaggagctgtccttagtacgagaggaccgggatggacatacctctggtgtaccagttgtgccgccaggcgcatcgctgggtagctatgtatggacgggataaacgctgaaagcatctaagtgtgaagcccccctcgagatgagatttcccattcctttatggaagtaagacccctgaaagatgatcaggtagataggctaggagtggaagtacagcgatgtatggagcggactagtactaatcggtcgaggacttaaccaaaggtgcaatgttaggcttttgaaatgaaatattacttattatgcagttttgagagaacgaagttcttctcagtgcgcaagcacaaaatagtgtggtggcgatagcaagaaggatacacctgttcccatgtcgaacacagaagttaagcttcttagcgccgatagtagttggtgggaaactacctgcgaggataggacgttgccgcgcttttattgatggaggtttagctcagttgggagagcgtctgccttacaagcagagggtcacaggttcgagccctgtaacctccattgagtcgttagctcagttggtagagcatctgacttttaatcagagggtcgacagttcgagcctgtcacgactcatcggccaagttacacgccaaaatgcgggtgtggcggaattggcagacgcgctagatttaggttctagtgtctatatagacgtgggggttcaagtcccttcacccgcattcaattgaatattcaatgaaagttatcttattatgccgacttagctcagttggtagagcatctgatttgtaatcagagggtcgggcgttcgaatcgtctagtcggcattaagatgcggaagtagttcagtggtagaacatcaccttgccatggtgggggtcgcgggttcgaatcccgtcttccgctttcattatgattaagccggggtggcggaactggcagacgcacgggacttaaaatcccgcggtaggtgactaccgtaccggttcgattccggtcctcggcatcataatgaaaaatgcacccatagcgcaactggatagagtgtctgactacgaatcagaaggttgtaggttcgactcctactgggtgcatataacgggaaatagctcagcttggtagagcacctggtttgggaccagggggtcgcaggttcgaatcctgttttcccgattgtaacgtaagttacatgttataaatttaagttttttggcggtgtagctcagctggctagagcgtccggttcatacccgggaggtcgggggttcgatccccttcgccgctatttttcaaaaaacttggacctttagctcagttggttagagcagacggctcataaccgcccggtcgtaggttcgagtcctacaaggtccatcgtttggtgagattttgtaggtggttataatatttttatattatcgcgggatggagcagtctggtagctcgtcgggctcataacccgaaggtcgtaggttcaaaccctactcccgcaattggtcgcatggtctagctggttaggacgcctgcctgtcacgcaggagatcacgggttcgagtcccgttgtgaccgtttcaaaatggctcagtagctcagttggtagagcaatggattgaagctccatgtgtcggcagttcgattctgtcctgcgccatatcatgaatatgcgggtgtagtttagtggtaaaaccacagccttccaagctgttgtcgcgagtccgattctcgtcacccgcttttcatgggcctatagctcagctggttagagcgcacgcctgataagcgtgaggtcgatggttcgagtccatttaggcccattatctaaataatatggagaagtactcaagtggctgaagaggcgcccctgctaagggtgtaggtcgggaaactggcgcgagggttcaaatccctccttctccgttttgtatggcccgttggtcaagtggttaagacaccgccctttcacggcggtatcatgggttcaaatcccgtacgggtcattgtaacaatgttacattttatatgttttatggagaattacccaagtctggctgaagggaacggtcttgaaaaccgtcaggtgggttctgcccacgcgagagttcgaatctctcattctcctttatattatcgcgggatggagcagtctggtagctcgtcgggctcataacccgaaggtcgtaggttcaaaccctactcccgcaatttggtcgcatggtctagctggttaggacgcctgcctgtcacgcaggagatcacgggttcgagtcccgttgtgaccgtttcaaaatggctcagtagctcagttggtagagcaatggattgaagctccatgtgtcggcagttcgattctgtcctgcgccatttttggaggagtagcgaagtggctaaacgcggcggactgtaaatccgctccttcgggttcggtggttcgaatccactctcctccatattttttagggatatagtttaaaggtagaactacggtctccaaaaccgtcagtgtgggttcaattcctactatccctgtttatattatagcttgcatattatgtgtgaatgtagtataattattcatgttaatgatggcggtattggtgaagtggttaacacatcggtttgtggatccgacatacgtgggttcgattcccacataccgcctttattcttgggctatggccaagcggtaaggcaacaggttttgatcctgtcatgcgctggttcgaatccagctagcccaatttactttttaagggacaggatttgttcttttatggcggtatagccaagtggtaaggcagaggtctgcaaaacctttatcaccggttcaaatccggttaccgcctttgcgtttaggcgctaaccttaattggtcaaaatgccggtgtggcggaattggcagacgcgcgggattcaaaatcccgtttcctcacggaagtatcggttcgaccccgatcaccggtataattgaacattatacagttttaaaaagccttagagatagggctttttttgttgcgttaataccatggttcttttgaatactaatagttaattggtagattgcaaatttaatccgaatttttggacaaatttgtcagcataacctgatacggtgtttgccagtcgagtattttaagcggtcgctggttaatttggagtaacgtcgtcgttaaatcttgagcactaatgtgctcaaaacgagtccctttaggataaaaataacgtaaattccgattaaagcgttcattactaccacgttcagctggcgtataagcatggcagtaataggtcttaataccatattgtgattcaagtgatactagtccactaaactcagtgccacggtccacagtaaagctgtgcaccggaccattaaaagtggttaggaacttagttagtgcttcattaacagtcgctgtcgtccgatcttttaaccggtatgcccaaaggaaccgtgatttgcgatcgattaaagttaataaaactgccttactatgcccacgaggaccaacgactgtatctagttcaaaatcgccgatgcgcttacgttgattaatcatcatgggacgctgttcaattgatcgccccaaagattgattatatttggatcgttggtcaacgttacgccgttggcgtacgccatgttcaggtagatcattcaaggagaaaccaattctcccctgatttagccaattataaatagatttagtagctagtttaaattcgtgagcaatcattcctggtgaccagcctagacgtaaatggttgagaattttttgctttaactcatcgctcagcttagttttccgaccacatcgtgatcgcttgtattcggcatctgtttgtgctaattcagcctgataaggttgacatcgagataattcataagaaattgttgacggtgatcggttcagccgaacgcccatttggatattggacagccctagttcacaaaaggtttcgattttaattcgttcggaataggttatactagacaaaagatcagctcctaaaagatgggtttgtggtaaacaccattttaaaggaagctgatcttttttgtccgaacagcgttcggattaattttacaatctacctaataagcattggggggttgctaaaaatgacattaactatgtgtcaccgaagcaacttattgatcaaatttgtaattccagaaaagtcggtgctaatttattaattaataccgggcttgaatttgacggtgccattccagcattttcacagtcgttattgaagattgtcggacaatggatgtcagtttatggagaagcaatttatgcgacaaatcattatgaaaatcagacctacttggcaagtggcgagacaaccgattttatcaaaggaaactatctgtttgtctatggtttaggtaatataggtaatagtaatgttgtgctgggtggcgaaaaggcgcggaagatagtgtttaatcaatatccgcaacgcgtaactagcatcacttggttagataatcaagcgttgtttgagtttgagcaggctttagacgggacgctaacaatttatgccaatgcttttcaatatgggacacatttaattgatcgcgtagccactataactgtcgaagactagtgacgaggtagaagatgaaaacaaaagatgtaacgattaggtatcaaaaaacagcgacggttcatagtgatcgcaatcaactggcttggcttggaaagatagcagttgggacatgtttcttgatgtacgtatcatatatccaacaaattatggctaatttagctgggcaccctgtgtcggcgattcaaccaagcgttgcgatggttaatgcgactttgtggtttagttacggttggtttaaaccacataaagattggccaatcatcatttcaaatgtcccaggaatcatatttgggctggtaacattaattacaatttattaccattaatagcaaaataacccgggtcaattgacccgggttatttttttgatcaacttacgctaaattaattgacaccctttatgaatggtatggtaccataggcgtaattagaaaagcgaagggattcgggcgcatgcgacgttctaaatggataataatcatcattggtttaggagttttaattggcagtggatggtggcttttagggaatgcaacgacgcaaaaagcgcagcaagtcaagcaaacagaaaatgaacagcccactttttatttgcatggttatggcggttcggctcgttcgactgatagcatgatcaaagctgctcgcgaacaaaagaatgcgacacaggtcctcactgcaaccgttcgtaaggatggttcagttgatttacaggggcgttggttagctaaaacgacacgaccaatcgtgcaagttgttttcgaagataatcgcaatcctaactatcaacaagatggtgagtggtttaaaaacgtcttagtcgcggttaatcggcagcacagcttcaaacgattcaacgtggtggctcattcgatgggcaacttgacggccgtttattatttattgaaccatgcgattgataaacagttaccccgtatggcgaagatggtgaatattgcgggtcattttgatgggattatcgggatggatgatcagcctaatcaaaaccaggttaaaaaggatggccaaccacaaaaaatgaacgcgacttatcggcaactgatgggactgcgtaaccagctccctgctaaatcgattacggtgttgaatatctatggggatttaggcgatgggacgcattctgacggacgtgttagtaatgcatcgtcacagtcgttgcggtatttggtgacgcctggtgcgaagacctatcaagaaaagaagtttactggtaaaaaagcgcagcatagtcaattacacgaaaatcatgcagtcaatcaaactgtcttagcgtttttatggtaaaacatacttaaaaagtggtggcgacaaaaattaattttgtcgccaccacttttttaatgttcaagacggtagtctcgcgctgcttgttcgagattcgaaatgagagcttgttgttttggtgagaagaactgggtcttacgataggctaacgagatataaaagattggttgtggttcatccaataaatcaagtaccactaagtcatcagcaggcgtaatactggtttcagttagaaaaccgatgccgacattttcgtgaatcatactttttaagacactaacgtcattggtgcggtaaataatttcgggtttgatttgattgacgtccgataagttcttgaagaccacgggatgcacgaatccttccgcgagcataataaatttctcgtgggctaaatcacgaaaggcgaccgctggtttctgggctaagggactatcaggtgcaactacaatcttaaaatggtgacgttcgatgactttagctgtgatggtatcggtttgaagtggcgtcgcagagccaagaagcgcgacatctagttcaccggcttctaatgaagccaacaattctttggaacccccatcagctgtcttaaaatgttgaatcgtgccgttagcggctagcttttgtgctaattttgagaagtagtaagtgccgataattggtggcaagccaaaacgcaaatcagtagcgttgagattgagcatgtcggcctttgttagttcaatctccgctaatattcgcgcggcatgttgataaagttgctcaccactaggggtaataatcaatgattggtgtgattgatcgcgctgaatgagtttggtcgcgaattcatcttcaaggcgtttgaccgcgtaagtgatcgtcggttgactgaccttgaattgatcagcgactgccgtaaaattttttaatttaattagcgcagcaaaataggccaaatctttaatcttcataaaaactcctgtttaatgcagtttagacgtttcatataaatctattttatcataaatgtaagttttgactatcaaatgttgaggcgtgtatagtgaccaacatgatataaaagaaaaggagatttttaatatgaaagcacaacaaattttaaatgatccatttttaaataagggtacagcattcactgctgaagaacgtgcacaatttggtttaacggggatgttaccacctcacgtgcaaaccattgatgaacaagttaaacaagcttatgcccaatatcaatcaaaagccaacatgcttgaacaacggattttcttaatgtcaatttttaatgaaaaccgtgtgttgttctttaaattattcagccaacatgttgctgaattcatgccagtggtttacgatccaacgatcgctgacacaatcgaaaactacagtgctttatatgtgaacccccaaaacgctgctttcttatcaatcgacgatcctgattcaatgaagacaaccttggcaaacgctgctgatggtcgcgaaattaaattaatcgttgtgactgatggcgaaggaatcttagggattggcgactggggcacacaaggtgtggatatctcagttggtaaattaatggtttatacggctgctgccgggattgatcctagtcaagtcttaccagttgttttagatgctgggacgaaccgtgaaagcttactcaatgatgagttatacttaggcaaccgtcatgaacgggttcgcggcgatcgttactacgatttcgtcgatcaattcgtgcaaacagctgaagacctattccctaatatgtatcttcactttgaagattttggccggagcaatgctgctaatattttgaacaagtacaaagatcaaatcgtgacgttcaatgatgatatccaaggcacagggattatcacattagctgggattatgggcgctttaaatatctctggtggcaagatgaccgaccaagtttacatgagctttggtgctgggactgcgggtgctgggattacccatcgcatcttcgaagaaatgttacaagaaggtttaactgaagaacaagcacgtagccgtttctacatggttgacaagcaagggctattgtttgatgatgatccagaattaacaccagaacaaaaaccatttgcgcgcaaacggagtgaattcgcgaatgctgatgaattaacaactttagaagctgctgtcaaagcaatccacccaaccattttagtggggacttcaacccaacctgggacctttacagaatcaatcgtgaaggaaatggctgctcacacagaacgcccaattattttcccattgtcaaacccaacgaaattagctgaagcagctgctgcagacttaatcaagtggactgacggcaaagctttagtagcgactgggattcctgctgcacctgttgaatacaacggtgtcacatatgaaatcggtcaagcaaacaacgctttagtctatccagggcttggtttaggcacaatcgcttccactgcgaaagtcttaaatgacgaaatgattagcaaagcagctcactcattgggtggcattgttgatccaacagaacctggcgcagctgtcttgcctcctgtgacaaaactagatatcttctcacaaacggttgcgaacgctgttgctcaaagcgctgttgatcaaggtttgaataaagaaccaattgctgacgtgcaaaaagccgtcgcagacatgaaatgggaaccagaatacaaagtactataatttaaatataaatcggtaggagcgtgaaagagttggcagcatttctaacatcattatcaagcgttgtcgaaatcgtcttagtcattgcattggggttttggctacggagttcaaaaaaattcgatgataattttaaaggcacaatttcatttttaatcatgaatgtcgctttaccattatcaattttcgtctcagtattagataacttaacccgtgaaaagttggtcggtttatctggcggcttgatctacgtcttaattagtttcgccctcggttatctcgtggcatggttactaaccaaggctttccggattcggccaggtcgtcgagggacatttatcaatatgttcgtcaatgctaataccatcttcattgggttaccattgaacttggcactattcggtgacaagagtttaccttacttcttgatctactatgtggccaatacggtttcaacatgggcaatcggggtcttcttcatctcaaatgatgatccaatcaaagaaaaaggcgctgctaaaggcaaatttaactggcgtaaattattaccttcaccattaatcggtttcttagccgcattaatttatcttttaactggtttaccattaccagaacttgttgataagacattctcaatggtcggtggcatcgtaacaccaatgtcattgatctacattgggattatcttagctgatgctggtttgaaatcaatccatttcgaccgcgatacagtccttgcgttattaggccgtttcgttgtggcaccagccatcatgattgccatcatgctattcttcaagaacacaacttcaattccatcaatcgaacaaagcacattgattattcaagctgcaacacctggtttggctgtcttaccaatcttagttggtcaatcacatggtgacgttgaatatgcaacgaacgttgtcacaacaagtaccgtcttattcgtggtcgttgtcccaatcttgatgcaaattgttcaatatatctaaagcttaaatgtgtcgttcagctgacactcccctaaatcttacccccagcgcgccgtctcaattaattgagacggcgctttttttgtgcaaagaaacacaaagaatgttgtcaaaggcggtaaagtgcattacaatgaaaacggatttaataatgtgaaggggacgatagcatgacagagaaaatctacactaacttagcacctgaaccattgggaccatacagccaagcgattgcaacggatcaactggtctttatgtcagggcaactcggattaaaagatggccaattggcaccggacttagcgagtcaaacaaaacaagtaatcacgaatatgcaacacgtgttagcggcagcaggattatccctagaaaacgttgtgaaaaccaattgttttttaactgatttggatgactttaacgaattcaatgaagtatatgcgcgattcttcggtgatatcgcaccggctagaagtgccgttcaagttggtaaactaccagctggcgcaattgttgagatagaagcagttgcaattcgttaatgccgtaattgactgaataaacaaccatttgaaaaaagcctccagaggaaattaaatgcatttcatttaatcatctctgggggcttttttgcatgcctgaaatttaatgtttaaagggatgttcatgggtacaaatactgatatataggcattgttgtgaaaatattctaccaatgtggtagattgcaaatttaatccgaatttttggacaaatttgtcagcataacctgatacggtgtttgccagtcgagtattttaagcggtcgctggttaatttggagtaacgtcgtcgttaaatcttgagcactaatgtgctcaaaacgagtccctttaggataaaaataacgtaaattccgattaaagcgttcattactaccacgttcagctggagtataagcatggcagtaataggtcttaataccatattgtgattcaagtgatactagcccactaaactcagtgccacggtccacagtaaagctgtgcaccggaccattaaaagtggttaggaacttagttagtgcttcattaacagtcgctgtcgtccgatcttttaaccggtatgcccaaaggaaccgtgatttgcgatcgattaaagttaataaaactgccttactatgcccacgaggaccaacgactgtatctagttcaaaatcgccgatgcgcttacgttgattaatcatcatgggacgctgttcaattgatcgccccaaagattgattatatttggatcgttggtcaacgttacgccgttggcgtacgccatgttcaggtagatcattcaaggagaaaccaattctcccctgatttagccaattataaatagatttagtagctagtttaaattcgtgagcaatcattcctggtgaccagcttagacgtaaatggttgagaattttttgctttaactcatcgctcagcttagttttccgaccacatcgtgatcgcttgtattcggcatctgtttgtgctaattcagcctgataaggttgacatcgagataattcataagaaattgttgacggtgatcggttcagccgaacgcccatttggatattggacagccctagttcacaaaaggtttcgattttaattcgttcggaataggttatactagacaaaagatcagctcctaaaagatgggtttgtggtaaacaccattttaaaggaagctgatcttttttgtccgaacagcgttcggattaattttacaatctaccatgttaattataaaaagattaaaattagatgatgaaaattgcggataaaatgaagctccagcgcgaccattttgatgacatggaaccgaatacaaatatcggcattaaagaagtttacacatgttgcataatcatagatagggattatctctttaaaagatttaacagattcgttttaaaacaacttgtacacaatttaatagcttatcagaatgaaaaaacattaagtccaattggtgattaattgattgaatctttgatatcccaattgataactagaccgtaccaaaggtgtagtgatgaatggaaaaatagaaaaatcatatggaggtagacgatggatagaagaaaattagcgctgggtgcaacaatgctgaccatgttattgacgtttatctgtatcaatagtggtcgtactcaagcagcgatacccgcccatattccaatcgatggcatctttaaaccctccattggggtagatagttccgttcaagcaggtggaattgtgcaagtgacaccagatagccagaacaagaagggggcaatttggtcggaagagcagtataagattgatttgacacataattttacaagtttaatgtatgtcaatttaggggacaaaaaagcgcaatcggttgacgggatggcctttgcaatgatgaatgacccagacaaggttaagaattggcagcaagtgaccggtggcgcccttggtgtttggcggaatccattttcttgggtaaaagataactcagcaatcgccaagtcatttgccgttgaattcgatacgtaccataatggcaatgattttgacggtttgctacccaatgatggcccagatagaggccatgttgcttataattttccaggacaagatagtgcatatcagcgtttaccaagtcgcttgtacgcgctaaaccatctacaacttcaaaaaccgcaaaatggtgattatttatcattagtaacattaggccatatcgtgatggcaccaagtgtacaggctgcgacaacatcgaatgaaacaactacgaggaaaattgcactagaagcaggggacacaacaacgactaacccaccaattgtgccagggacagatggaaacggaaacggaccaactggcgcaacaggggatatcacgattgataatttaacaccacttgattttggtaaggtgaaactgactggtggcgcgcaaaacgttaagaatatcgttaaagatcctaacgtacaagtcaccgataaacggggaactggcgctggctagaatattaccgttaaaagttcagaatttaaagacacaacggattcaacgcatatcttaaaaggcgcacagattaattttccagtcggtaaagtagtcgctagtgattcaacgaatactgctgcaccaacagccaaagcgattactgttcctgctgatgggttggataatgcgcaaatcttgatgagtgctgataaagataaagggatgggaacatgggcagatgtgatgacaactgacggcattacactggatatcgctggtggcgcttatgctggcagctataatgctgatttgacctggacacttggggatacaccgcttcaattagctggcagcagccgctaaatttgaaagaggcaagtgttaagtcgttactgcaacggactaaattttaatcgatgtgcaaagtgattaaagagagggacttcaaaaatgaaatggatgcatattttacaaagaatcagcgtcgtcatcttaatgggcggcatcgcgttgtggttgaatacaacgaccgtccaagcggctgatcagagtatgaattaccaagttaaagcgaatttacccagcagtcaaaacaatcaaagtgtaacatattttgatttaaggctggcacctaatcaggaagagacgattagtatcacggtgcaaaataaggataaccaagcgcatatctttaacatcagtccgaatacggcggtgactaatcaaaacggggtcgttgattatagccagtcaaagaaaaaagcggatgaaacggcgcctgctaatattgcctcactgattacgggggataaaaaagtaacggtgccggctcacagtagcaaggacgccatttttaaaattaaaatgcctgctaagaagttccattgtactttattaggtggttttaatattgttcgtgaagggcagcctaccgttaaaaagcaaaagaatcgcgtgacattgcgtaaccaattcgcttatgtaatcggtctgaaagtgaccgaaagtgatgccattattgcgccaaatctgaaactgaatcacatcaaagcggggctcgttaactatcggacagcaattacggctaatttacagaatacaaaggctgttatgatcagaggcttgaaagttgatgcggtggttaccaagttaggctctgatcaagtgcttcaccggacagtcaaatcagacattgcgatggcaccgaattcgaactttgagtacgccatcaactgggataatgaagcgctgaagccgggcaaataaatgcttaagctaaccgccactgataagtcgggcggttagtggtattttacgagtcggtttaatattacagagcaaaaagcccatcaagctaatgaccaagccgttgatttacaaaaaacaaccattaactggtggtatatcatgtggtggcatattcctggtgctcttagttgggtatattatttttctaaaacgacaagcgaaaaaagcctgattcaatgaagtcccaatcctgagcgcgtcatcgattagaatggattcgaaaataatcccttgataatgaatagatggaagtattatctctattcactaccaagggatttttatatgtgctgcgttattggttgttcggttaattaggtttaaaaaagagggaatggattttatatcacgttatttacgaatgatattcataaacagtggttttttgatgccatttaacgtataataaattaaaaacaaattagagatgaggcaagaatattgatttcgactgaaacgacactagctgggtaccactttgataactgtttcatgaacgcggcgggggtttattgttatgatgctgctgagttaaatcaagtgcaggcttcaatggcagggactttcgtgaccaagagtgccaccgttatgccccgctctggaaatccagaaccacgttatcaaccaacgcgtttaggcagtatcaattcaatgggcttgccgaatgaaggcctaccttattatttagactatgtgagtcaacagcaaaaggcagtgccagacaagacatactttcaatcgattacgggatttaatattgaagaagacgagcaactgttggcacagattagtgcttctgattttaaaggtgtggtggaattgaacttatcttgtccgaacgtaccggggaagccgcaaacgggctatgattttgaaatggtggaacgaattctaacgcgagtttttacggtttatcacggtccattaggcgttaaattaccgccgtactttgatatcgtgcattttgatcagatggcggcgattttgaatcaatttccattagcgtttgtcaattcggtgaatagcattggaaatggcttgaaaattgatgtggcaactgaacgggttgtgattaaacctaagcatggtttcggtggcatcggtggcgattatatcaaaccaaccgccttagcgaatgtccatgccttctatcagcgtttgaatccagccattcaaattattgggactggtgggattaaatctggtcaagatgcatttgaacatattttatgtggggctagcatggtccaagttgggacagcgcttcaaaaagaaggccccattatttttaaacgtttaacgcgcgaattacagacaagcatggctcaaaaaggttatactaaactgtctgactttagaggcaaattacaatatttagattagttgaaatgaggatttacaatgcagtatcgttatttattttttgacatggacaatactttattcgattttgatgcggatgaagatcaagctttggcccaattattcaaagatcaaggggttcaattgaccccaacaattaagacaacttatcagacctttaatcaaaacttgtggcggcagtatgaagaaggtacgttaacccgggaaatattattgaacacacgctttgcaaccttctttaaagaacagtttaatcaggaagttgatggaccaagattgtcccaaaattatttagacaacttggcattaggccatgatttaatgccacaagcagaagctctgttaaaggcgttaaaagcagctaacattaagctatatgtcacaaccaacggggttgccaacacgcaatatcggcggttacaagattcaggattaatcacatatttcgatgccgtttttgtttcggaagagttgggatatcaaaaaccagatccacggtatttccaaagtgtcttccaacaattagaggggatctcacaagcagaagctttgattgtcggtgattcacttacttcagatgtgcaaggtgggcagaacgtgggtgtcgccacagcgtggtataacccgaaccagctagcaaatcaaatgacagacatacagccaacacacgaaattgaacacttaatggacttattggcaatttaaaagccgatttgcggcattcaagaggagtagataaaacatgaaaaagcaacgatattttagaattagcctaggttggcgaatcttaattggaatcggcctagggttagtggttggtcggtttttctaccataatcaaaccgctatctcaatcttacaatcaatcggaaccttgttcatcaatttaattaagatgattgtgttaccaattgttgtttcctgtttggtcgttgggattgccaagatgggtgatatcaaaaaacttggccgaattggtggtaagacgttattgtatttcgaagtgatgacgaccttcgcaattattctcggattagctgtcggcaatattgctaaaccaggagcgctgattgacattcatagtttggcacatggctcaattagtcagtacacagcagccgctaagaccgctggaaatcatggcttgggtgatatcatcatggatatcgtgccaacgaatttctttgcggccttggggtctggtgaaatgattccagtcatcttctttacggtcatgttcggtttagggttggcgacctttggtaaaaaggcaaccccgctcatcgatgcttttgaaatgatttcagaggttatgttcaagatgacaaactggattatgcagttagcaccaatcggggtgtttgcattaatcggggttacaattgcccaattcggatttgaagctttgaaaccattgctctatttcatcatcgtttgttacgcaacgatggcatttttcgtggttgttgtggctgggttggtcgcgcggatttggcacatcaatatctttgaaatcttgaaagttttcaaagaagaattggtgctagccttttcaacggcgagttcagaagcagcgttacccaaagtaatggaaaaagtgcaaaattacggtgttagtcaagggattgcttcttttgtcattccaacgggttattcatttaacttggatggttcggcaatctaccaatcgctagcggcgctgtttttggcgcaagcctatcacattcatttaagcctcacccaacaaattactctattggtggtcttgatgattacctctaaagggatggctggggtccctggtgcttcattcgttgtcttattagcaacaatcaccacaatcggcgttccggctgctggtgtcgccttcattgcggggattgatcggattgtggatatgggacgaactgccgttaacgtaatgggaaactcattagcagcagtcattattgccaagtcagagaacgaatttgatgaacaaaaatatcaacaatatatgagtggcaatgaacttaaataaagcaaagaccttaaatcaatcgatttaaggtcttttttgtataaaaaacgattttagcacaccgcaaacattagcggtatctaattataaaagcttaagtaatgcgacttttagcgcttttttgtcgattatctagaccaatttcgcagataatctaaaaaatgattagacagattagaattttgtggtaaaattaatccagtaaagcgttttaaaaaataaaaacgtggaactgttaactcagtcaataatgtttaagccattatttttttatattaattgatagcgttttattgatgagtatgacaactatttttattaaggaggtttttgtgaatggttggaatcgttattgcaagtcacggggagtttgctaaaggaatcatgcaatctggctcaatgatttttggcgaacaagaaaaagtacaagctgttacttttatgccaaatgaaggaccagatgatttgaaagcgcatttagaagctgccgttgcaacgtttgatgcagatgatgacgtcttattcttagttgatctttggggaggttcaccatttaatcaagctaatgggttgttcgaagcacataaagataggtgggcaatcgttacaggattaaacttaccaatgttgattgaagcttacgcatctcgtttatctatgacatctgctcatgaaatcgcagcacatatcattgatgaagctaaagcaggggtacgggttaaacctgaagaactacaaccagaagaagcacctaaggcagaagccgcacaaacgacttcaaactcaggcacacctggtaagttcaaatatgtcttggcacgaattgattcacgtttattacatggtcaagttgcaacgacatggtcgaagacaactaacccaacacggattatcgttgtttcagataacgttgctaaagatgaattacggacaaacttaattaaacaagctgctcctagtggcatcaaagcacacgtcgtgccagttgatcaaatgattaaattggcaaaagatgaccaacactttggtaaggaacgtgctttgttattatttgaatcaccacaagatgcacttagagcagttgaaggtggcgttccattagaaacaattaacgttggttcaatggcgcactcaactggtaaagtgcaaccaaatactgttttggcttttgaccaagatgatattgatacctttgaaaaactaaaagctaagggcatcaagttcgatgttcgtaaagtgccaagtgactcaaacggtaacatggatagtatccttaaaaaagcacaagcagaactagacaaacaaaataacaaataacatcagaagaaattggaggattaataatcatggatttgaatttcattcaagtgattttggtcatttttatcgcatttctagctggtatggaaggtatcttagatcaattccatttccatcagccagttattgcttgtacactaatcggtcttgtaaccggtcaattactaccttgtcttatcttaggtgggacattacaaatgatcgccttaggttgggctaacattggtgccgctgttgcacccgatgctgctttggcatcaatcgcatctgcaattattttaatacttggtggccaaggaaaagccggcgttacatcagctatcgctatcgctgttcctcttgccgtagccgggttattattaacaatcatcgtacggacattagcaactggtatcgtgcacatcatggatgctgctgctaaagaaggtaacttccgtaagatcgaaatgtggcaatatatcgctattatcatgcaaggtttacgaatcgctattcctgcaggcttaatcttagcaatcggtgctggccctgttaaagaaatgttgacagcaatgccaatctggttaacagacggtttagcaatcggtggtgggatggtcgttgccgttggttacgcaatggttatcaacatgatggcaactaaagaagtatggccattcttcgcaattggtttcgtacttgctactatctcacaattgacacttatcggccttggtgcaatcggtgtttcacttgccctattatacttagccctttcaaaacaaggcggctcaggtaatggcggcggttcaaatactggtgacccacttggcgatattatcgacaactactaagaaggaggctaacaattatggcagaacaattaaaattaacgcgtaaagatcgtatttctgtttggctacgttcaactttccttcaaggttcttggaactacgaacgtatgcaaaatggtggttgggcttactcattaatcccagcaattaagaaattatacaaaacaaaagaagaccgggcagctgctttagttcgtcacatggaattctttaatactcatccttatgttgcttcaccaatcatcggggtaactttggcacttgaagaagaacgtgctaatggtgcaccaattgatgatgttacaattcaaggggttaaagttgggatgatgggacctttggctggtatcggcgatcccgtattctggttcactgttaaaccaatcatcggtgctttggctgcttcacttgctatgagtggtaacattcttggcccaatcatttactttatcgcttggaatgctatccggatgtcattcatgtggtatacacaagaattcggctaccgtgctggttcaaagattacagaagatttatctggtggtattttgcaagacatcacaaagggtgcttcaatccttgggatgttcatcttaggttcgttggttaaccgttgggtatctgtcaagtttacgccagttgtttcatctgttaagttggacaaaggcgcattcatcgactgggataaattacctagcggtgctaagggtatccaatcagccttacaacaacaagctcaaggtttgtcattgacaagcaataaagtgacaacgttgcaagacaacttggatagtttaattcctgggttagctgcattaggattaacattattctgtatgtggttacttaagaagaaagtctcaccaatcgtgattattcttggcttattcgtagtcggaattgtcttccatctattacacttaatgtaaaagagtgcataagcaggcgcctatattttgaggattaactggatttgacgaattggcgatgcaatcgccgatttggcaaatttggttaaccgcaggaatatgcctactgaagcacgtttagaaaacaaaggaggggctaggacaaagtcaatttgtcctagcccctcctttttataaaagcgtataatgaaagtaagtttttggaaatggagtcgatattatggttcaatcgattaatacaaaggtggacttagtgattaaagccacgtcgtttacagcactctctgattacggacaaatcatgatcggggatagagggtttgaatttttcaatgatcgtgacgcacgacaatttattcaaattccatgggaagaagttgactatgtgattgcatcagtcatgttcaaaggcaagtggattccccgctatgctatccaaacaaagaaaaatgggacgtatacttttgcttcaaaggaacccaaaaaagtactccgcgccattcgcgagtatgtgcccgcagaacgcttagttcaatcactaggggtctgggatgtgattaagcgtgtgtttaaacgcaaatcaaattaacttcaggaaggtgtgaccaatattggtcacacctttttttgaatcgaattgcctgtgattttaattggtaccgatttgagtggcgtgctagaatatcatataaggttgattgttcaacattttaaaaaattaagttaaatgaggtaatgatcatgggatttgatgaagcgattaatgcaattaaggctggcaaaaaagtggtacggactggctgggatggtccagaattatttattttccaagtggccgatgggacattcgaggggcaagcaattagtccctacctattaattaaaacaaccgaaacaccagcatactcaatgttccaaccaacatcgtgtgatgtattggctgatgattggcaattggtcgactaatggggcattttgcagatttagcgactaaaaccattttaattaccggggcggcatcgggaattgggtgcgctcaagtggacgcttttttagcagagggggcattggtgttagcacttgatcgccagccgattgaagtccctgttgatagtcggtgcatcacagcgcaggttgatgtttgtgatgaaacgcaattaacaatgacattagcgactttgctggcagaacatggcccaatcgatgtggtctgcaacacggcaggcgtgttggatgcttatgcaccaacgcttgataccagtagtgcggagtgggatcgaattatggcaacgaatttaaaaagtcaatatcttgtaacaaatgcgatcttgccaacaatggttgcgcaaaagcgtggggtattcgttaatatggcttcgattgctgggctagttgctggtggcggtggtgcggcttatacggcatcgaaacacgccatcattggctatacaaagcagcttgattatgattacgccgctaaggggattcgcgccaactgtatcgccccaggtgcgattgagacgccgatgaacgcagccgatttttcggggactggtgagatggcacaagaagttgcccgtcagacaccagcggggcgttgggcacaaccaactgaagttgcgagcttaagtgtttacttggcgagtgatgttgcggattacattcatggcaccgtcgttccaattgatggtggctggattgaaaaataacgctgactaaggagattatgatggcaaaacaaattaaattaagtcaaaccgtttatgaattggtaacggcctatcctgaagtggtgtcggtgcttgttgaaattgggcttgatggggtcacgaacccagcgcttttgaatactgcggggcgttttatgacattgcctaaaggagctaagatgaagcaaattcctttgacgacgattatcgctagtctagaagcacaaggattcgaggtgttagctgatgtgtgagcaacagcatagcagtgcgtaccgccaaaaacgaatcgtggaaatcttaaaaatgctgcatgaaggtggctcgtttgaagaggctaagcggatttttgatgagtccttttctggggttgacgtgtctgaaattacgtctgctgaacgggaattgattgccagtggcttgaacccgatggagattcaacatttgtgtaatgtccatgctgcggttttcaagggggcgattaattcaaatggggctgaaacgccggaacaagaacagccaggacacccagtcgctgtgatgaaattagaaaatttggttatgaactcgctcttaaatgatgaattactgccatgtttgaagaaatggcagcagtcagggactgaccaaaattatctcgtgcggatgcaacaagcgttaaaagatttacagttgatcgaccgccactatttacggaaagaaaacttaatttttccgttgatggatcaatatgggattactgcaccacccaaagtgatgtggggggtggatgatcaaattcgggggttggtgaagacggcctatcaaatggtaactgcggaaccaattccggataaatatgcaattgaagcagccgttgaaaagatgagcaaagaaattcaagaaatgattttcaaagaagaagaaatcatgattccgatggttaatgaagtctttacaccagctgactggggactaattgcttctgaaagccaaccaatcgggtataccttaattccagacccattaccatggcaaccaagtgctgaagctattgcggcggtcgaaaagcggaccgtgccgaagattgcgcaagaactgaatgcgatggcgcaatcgttggcggatgcgcaaatgacgatccaaacaacgccaccagaaccggcaccaacttcgatggcggcagcggctaatattccgtttgaaattcacggacaacctgtaccaaaagcccccgctgaaaaagatgaaggaaaaccagaaatgccagattttgtgaaggcaatgttagctgacgaaaaagaagcggcaccaaaagcgaaggttcaagcacgtcgggaagcaccacaaccccatatcgaaattggcgtggataaccaagctaaaatcgttctaccatctgggtcgatgaatatcagcgaattgacggcgattctccaagtactaccgcttgatttaacctttgtcgatcaaaacgatattgtgcggtggttctcagataacgagcatcgtattttcccaagaacccgggcagtgattggccgcgcagttgtgaactgccatccaccaaagagtgtggataaggttgagaaaattttagcggactttcatgcagggcgagaagacaacgctgatttttggttgaacttccgcgggatgttcgtctatattcgctattttgcggttcgtaatccacagggacaatacttaggctgtttagaagtcagtcaggatttaacggaactccgtgcactaacaggcgaaaaacggttataaaaatgcattaagaggagaaaagagatgcaacaaattattttattacttgccgtcggtgttttagccggcgtgttgggttcaatcttagggattggtggcgggatcattgtaacccccgtattaacgctagcgattggcctagatattaaatacgcgattggggccagcattattgccgtgattgcaacaagttctggtgcaactatcgcctatttgaaagatgatatgctcaacttacgagtggcgatgttcctagaaatcgcaacgaccgtcggggcgattatcggggcgttattgaccggcattgtaccaactggattcttattcatcttattcggcgcattcttgctattttcaacgtacaacatgattcaaaaattacgtggtaaagttgcagaacaacacgtcggcgctggtgaagataagtgggccaagaagttgaacttaaatggcacttactacgataaggccaaccaagaacaagtcgactacgctgttgaacaagtaccaggcggctttgccatgatgttcggggccggcattgcttctggcttgctcggtatcgggagtggggtattcaaagtgaccgccatggatacgattatgaagatgccattgaaaccatcaagtgccacgagtaatttgatgatgggggttacggcagcagcttcggccactgtttatttcttcagcggtgcgattattcccagcgttgctgcaccgttagcaatcggaattttggtgggttccactgtgggttcacggattatgcagtatttgcaaccacgtgtgattcgcatgatttttatccccattttgttatacacaggtttacaaatggtgcttaaaggattcggggtgcatatttaatgacagataaaaaagcagagatggctcaaattgaactcgtcatcggtaaaattttacgcattggggtggcggtttcagcaacgctgctcattattggcatgttacttgcgattattcatggcggtacaggttattcagaatatcaatttccaacgacctttaccgaaattttcagtggcattgctgcatttaaggctggcgctgtgattatgttgggcttattctgcctcattttaacgccagtcttgcgtgtggtggtatcaatctacgcatttgctaaagaaggggattacctctacgtttggattacggttattgtgttggtcatcttaatcatcgggatggcaattggttttataaagaaataaagagtggtttattagctcagtatctcgcgaggattaaaaaaagggccaacgacaaacatgtttgtcgttggcccttttttttgtggtgaattaggctaatccgcagaagataaccgggcttactgcgcactctgatttaaaacgtgctccgacagacatccgcttccggttagctacgtcccgcaaacaatcgacgtcgtcgcttattcacgagattaggctaatcctcagcgtataatcgtctgccgtcgcactctactttgaaacgtgctccgtaagccatcttcttccggttagcgacatcagtcaaatcaccgactttgtcggcaatccgcctgattaagctaatcctcagaagataaccgggcttactgcgcactctattccattcctagtattcttttctttttttcttcgaattcttcgtgggtcattaggccgtcgtcgcgcattttgaggtaagccatgataagatcaccggtcttaacataactgaggtcttcttcaacggttggtttttcgagatagtccgctaaggctgtgtataacttgcgcacagcgaggttatcgtcgggttcgaaactgatgacgattttttcgagggcgtggttgggtttttggtagagaatttggagatgaccatgccgataagtcgcttcaaaaaagcggactgattttaatttgctaaacggaatgtcacgatcctggttttgtttcttcttaaacagtccgggatagtgaattgttaggatattttcgtcataggttaattcgagtttttgaggttttttaatgagataagtttgcatcgcttgctcctttaatcattcttaagtaaaagcacggtagttcttaataaatgaagcctaaacttacctttatcatagtagacagtgaccctaaatagcaagctgttcgtattggtttatgaaatgaggtgggatgatgaaattttttatgggtattcgcaacggcctgttagtggcattaccgatttggtgtttaataatcttctcaattacgtattggttacgctaaaataaaaaaacgggcgccgcacaaaaactgtgcagtgcccgttttttaacgtaaattggctgttttttaggtctaaagacggtttttatgctagtatgaatagattacaattagtgacattgattgcatctaggcgatgtaattattataatgaaatcaaatgtccaaagataaggaggaggaaaccaattgaatattgggatatttacggacacctactttccacaagtcagtggtgtggcaacctccattaaaacattaaaagaagccctagaaaaacaagggcattcggtctacatatttacaacgaccgatccacatgttgacaaagatgcagtcgaaccgaatattttccggtttgctagtgtcccgtttgtctcatttacggatcggcgaattgctgtgcgcggcttatttcacgcttatcaagtggctaaggaattggatctcgatatcgtgcatacccagaccgaattttcgatgggctacatcgggaagtttgtcgctaaaaatttaaaaattccttgtttacatacgtatcatacgatgtacgaggattatttacactatgttttaaacgggaagttattacggccataccatgttaagcaaatgacaaaggcctttttatatcacatgtcaggcatcgtggcaccatcagagcgggtttctcaaaccttaaatggctatcaagtgaaggcccccatccggattattccgaccggggtcgatattagtcgctttgagcgcgaagtgacccgcgacatacgggccgaattgggcttgacgtcagaacaacctgtgctcttatcattgagtcgcgttgcttatgaaaaacggattgatatcttagttgatgcgttacccaaactagtcgcccaaacaccagatttaatgttagtgattgttggtgaaggtccagctcgagaagatttagaagctcaggttgccaagttaaacatgaccgaccacgtgattttcactggaatggttgataacgatgaagttgcaaattattatcatatggcgaatctttttgtctccgccagtgactctgaatcacaaggattaacttatattgaagcgatggccgctgaactcaagattgtcgtcatgacaagtccatatgcggctgagttattaactgatccttcaattgggacgacatttacgaacgaagatgaaatgatccatcaagtatcgaattatttgaatcatccacatgcatttgatgatccagcaccgcgccgaaagaagttgcatgctatttcggcggattactttgcggaacagatgattcatttctataagcaatcacagctattatatgacgaattaaagttagaccaagatgatttattggaattagaagatttagatactaaaaaataagtcgcgctggcggaaaactgttgatcatataatcaacagttttttcatatcgttgctaataacaagaaaaagggtcgtttatgagtagaacgaataagattgtttttgcagtcatgctgttgattgggtgtgggatttttgcctatgaaagtcgcacgctggcgttgaaacagctgtttatcgatattagtcatctgaaactttggtggctgttggtcgccttattatgtatgttaatttcgtggtttttcgaagcacttgtcttacgcgtctttctaaaagaccgcacagaacacttttctttatacaatgcgcttcggattccgttgattgcacaactattcaatgcgattacaccgttttcttcaggtggacaaccggcacaactggtagcgttgatgcaatcccgtgtagaagctgggcaagctagctcagtactgctgatgaagtttattgtttaccaattcatggtactggtgaatttcttattaagtatgatgattggtctctcgcaagtttccaagcattttgggacgctgtcgattttgattactttcggattaatcgtgcatgtggttgtgttagccgtattgttgctaatcatgtattacaatcgatttacgaaacagttagtgcactggttattaattccggtgggctggttcgtctcccaaaaacgggtgacggaatggcggacaatgttaatggccaaaatcgataccttttacgcggagagtctacaccttaaacgcgagaaaaagaaactaatcaagggctgtattttaacccttgggcaactttttttctattatagtgtgccatactttgtcttattggcacttggcatcccgcatgttaattatttagaggtgatggtcttacacatcatgattgtcatgattgtctcgctctttccagttccaggcggttctggtggggcagaatatagttttaagacgttatttgccacttttatcccgagttcaagtaaactggtgttaggcatgttgctctggcgattgtttacgtactatctcgggatgttcatggggattggggcgttagcagttaaaccacgagtaactgataaaaagtaggaggcgtttttgatgcaaccaacaattggcttcattggaacaggtgtcatgggtagtagcatggtcaagaatttattgaaggcagactatccagttgtcgtgtataaccggacaaaacaaaaagcggatgcagttgtggcactcggtgcaacatgggctgattcaccagcagcggttgtcgcgcaaagtcagattgtgttatcaatcgtcggttatccgcaagatgtcgaagccatctattatggtgaagacggaatttttagtgctgcacaacctggtcagattttggtggatatgacgaccagcacgccaacattggcgcagagaattgccaaaacagcagctgacaaaggtctgcaagcattagatgcgcctgtttctggtggcgatatcggcgcccaaaacgggacgttgacgattatggtcggtggcgatcaagctgcctatgaaacggcattacccttttttgaagcaatgggtaagactgtccatcgcttcggtgctgccgggacaggccaacatacaaagatggccaatcaaatcatgattgctggcacaatgaccggaatgacagagatgttagtgtatgctaaagcagccggattagaactagaagcggttttaaacacggttaatggtgggagtgctcagaactggagccttgcaaactatggtccacgtattctagcgcaagactatacaccaggctttttcgcaaaacattttttgaaggatttaaagattgcattaacggaatccgaaaagatggggctccatttaccagctacgcttcaagctaagaaactctatgcgcagctcgttaatgataaacaattaggcgacgatggcacccaagctttaattaaattatggtggccttctgcaaaataattggatataaacggtgcagaagtgctctttttctgataaactgatagttagttattaaaggaggcttcgccatgcaatcatcacagttagttgcgattatcaaacgtctggtagcaatgcaagaagatcaaagcgctgaggttcaagaaagacgttttgaaaaggacggcgatttaaaagcaactgttagctatgatcctcaagctcaagcatttgaacttgaagacagcaacacacatcaacaattccaatttgacaatattgatttagttgcaatggaactatacgatttattagcagactagttaattaaccattgagtatcgaattacttgatggtttttttgctacttaagcaggtgatagccttgctcagttgcgactcagattattaaaaatggtttaatatttggcattcaagccggttacatattgcttttcatttcacggatgtgtaaactaactttcagattgtcaacggcttttaaagcccaacgacctttaacggaggctactgtatcgatgaaacaaattggtcataaaattcaatcaggattaagcacacgatggggattcttccttttcgcagttgcgctattctggcttaaaacaatttacgcatatcaaacaaaatttaacttaggcgtcaaaggtggcatgcaggccttcttaatgacgattaatcccattccaacaaccttattgctatttgggattgccttgtttatgaatggccgaaagtcatacattacgttgattattattgatttaataacctcaacttggttattctcgaatattttgtattaccgtgaattttcagacttcttaacgtttaacttaatgaagggctctggtgcggtatcaaataacttgggcaagagtattgctgggattattgaatattctgatttcctagttttcgctgatgttttattgctaatcatcttattggctactaagttagtgaagattgatcaccgtgtctttatgaagcggaatgcatttgcaattactgggttagctgttgtgttattcggtgccaacctcgggattgcagaagcagatcgttctgggttattaacccggacgttcgataacaactacatcattaagtatcttgggatgaatgcatacactgtctatgatggcgtgaagacgaccaagaataatgcgattaaggctaatgctgatagtagtagtatgagtagtgtcttgaagtatatgaaggacaaccgggttgcacccaatgttgaatacactggcgtggctaagggtaagaacgtctttgttatccatttagagagtttccaacaatttttaattgattataagtgggacggtcaagaagtcacaccaaatatcaataagctatatcacgaccaaaacaccctcagtttcgacaatttctttaaccaagttggtcaaggtaagacggctgatgctgaattaatgctcgaaaactcattgttcgggttacctgaaggggccgccatggtcactcaagggacaaccaataccttccaagcagcaccatcaattctagatcaacaaggttacacaaccgcttcattccatggggatgtgccaagtttctggaatcgggataatacctacaagtcatggggctatgattacttcttcagttctcaatactttaaagaaggtaaaggctacaacgtgggttatggcttgaaagataagatcttcatgcaagactcagcccaatacattgaacaattaccacaaccgttctatgctaaattaatcaccgtgacaaatcactatccatacttattggataaacaaaatcaatcaattgctaagaccgatactggtgatgatacagttgatggttatgtgcaaaccgctaagtatttggatcaatcaattggtgaattcttagcttggttacaaaagactggcttagataagaatagtatgctcgttctatatggcgatcattatgggatttcagggaaccataagaaggctgttgcgaagttattgaatcaggataaatttactgattttgataatgcgcaattccaaaaagtaccgttcatggtgcatatggatgggttaaaaggtggcgttaaccatacctatggtggtgaaattgacgttttaccaactttattgaacctattaggtgtaaaaaatgacgataccatccaatttggttcggatttacttgcgcctaaccgcaatcagacggttgtctttagaaatggggactttgtcacaccacagtatacgaaggtaggcagcacctattacgatacgaataatgggaagacgctgacgaatttaacggcagcgcagaagaagcaattaacggcaatcagtgaacatgtaacggaagaattgtcactttctgacaaggtaatcaccggcgatctacttcgattctatacaccacaaggattcgaaaaaccagataagtctaagattagctacaaggtgaaagatgctaaagctaagttgaaagacagtaacaataaaacgagtgttatccagcaaaataatggtaagtcaacaatggacctttatgagacggatgcacctgaattgaagtaaagtatgtaaagacgttacgggactcgcgtaacgtctttttttgagcaaagatacttgtcagtctcgtcaaaaaaaggtacgattacagcaataaggatatatgataatgattatcattagcgaaaggtggtggcaaaatgagtcacatcgtgcaacaaacgttacggaaactcaaagaacacaacgtacggatcacgccacagcggcaagctgttttggaattcatgattggcactcatatgcatccgactgcagacgatgtctataaggcgctagcagggcgctttccgaatatgagtgttgcgacaatctataataacttgcgtctgtttacctcattagggattattgaagaaatggcttatggagatgcatccagtcattttgattttgcgcagaccaagcattatcacgctatttgtgagaactgtggaaaagtagttgatgttttttatccggagttagatgatgtagaagtgattgctgagaatctaacggggtttatggtaactgggcaccgaatggaagtgcatggtatctgtccagaatgccaagcaaagcttgcaaataactaagttgtttgaatatttagaaaaaagatgaattttatgcaaattttacttgacgatagatttagatgttggtatagtattctatgttgtcagcgagagaaaagctcatcgctaacgaaataacgggtcaaacgagattgaataaatattcagaaaatatttataaaaatcgcttgacagtgttcgttagaaatgatatattaattaagctgtttcaacacagtagatctttgaaaactgaacaaagtttcgataaaccaaatgtgtagggtcgcccttcggggcacaaaacatatttgcaaagtcaatttcgctagcaaataaattaagtaacaaaacaagagctacaaacttttaatcgagagtttgatcctggctcaggacgaacgctggcggcgtgcctaatacatgcaagtcgaacgcactctcgttagattgaagaagcttgcttctgattgataacatttgagtgagtggcggacgggtgagtaacacgtgggtaacctgccctaaagtgggggataacatttggaaacagatgctaataccgcataaaacctagcaccgcatggtgcaaggttgaaagatggtttcggctatcactttaggatggacccgcggtgcattagttagttggtgaggtaaaggctcaccaagaccgtgatgcatagccgacctgagagggtaatcggccacactgggactgagacacggcccagactcctacgggaggcagcagtagggaatcttccacaatggacgaaagtctgatggagcaacgccgcgtgagtgaagaaggttttcggatcgtaaaactctgttgttggagaagaacgtatttgatagtaactgatcaggtagtgacggtatccaaccagaaagccacggctaactacgtgccagcagccgcggtaatacgtaggtggcaagcgttgtccggatttattgggcgtaaagcgagcgcaggcggtttcttaagtctgatgtgaaagccttcggctcaaccgaagaagtgcatcggaaactgggaaacttgagtgcagaagaggacagtggaactccatgtgtagcggtgaaatgcgtagatatatggaagaacaccagtggcgaaggcggctgtctggtctgtaactgacgctgaggctcgaaagcatgggtagcaaacaggattagataccctggtagtccatgccgtaaacgatgagtgctaggtgttggagggtttccgcccttcagtgccgcagctaacgcattaagcactccgcctggggagtacgaccgcaaggttgaaactcaaaggaattgacgggggcccgcacaagcggtggagcatgtggtttaattcgaagcaacgcgaagaaccttaccaggtcttgacatcctttgaccactctagagatagagctttcccttcggggacaaagtgacaggtggtgcatggttgtcgtcagctcgtgtcgtgagatgttgggttaagtcccgcaacgagcgcaacccttattactagttgccagcatttagttgggcactctagtgagactgccggtgacaaaccggaggaaggtggggacgacgtcaaatcatcatgccccttatgacctgggctacacacgtgctacaatggatggtacaacgagtcgcgagaccgcgaggtttagctaatctcttaaaaccattctcagttcggattgtaggctgcaactcgcctacatgaagccggaatcgctagtaatcgcggatcagcatgccgcggtgaatacgttcccgggccttgtacacaccgcccgtcacaccatgagagtttgtaacacccaaagccggtgaggtaaccttcgggagccagccgtctaaggtgggacagatgattagggtgaagtcgtaacaaggtagccgtaggagaacctgcggctggatcacctcctttctaaggaataatacggaaaaccttgtacatttgcgaagtcgaaactttgtttagttttgagaggtctactctcaaactttgttctttgaaaactggataataagtaatatattagttttaaaagccgagaaaacattgcgttttaaagagttttttaatagaaatatgaattagttcatatcgctaaactcaaataataaccctttaccgtaggtaaagttaggttaagttataaagggcgcacggtggatgccttggcactaggagccgatgaaggacggtactaacaccgatatgcttcggggagctgtaagtaagctttgatccggagatttccgaatgggggaacccaatacctttagtcgggtattatcattaagtgaatacatagcttaatgaaggtagacgcggggaactgaaacatctaagtacctgcaggaagagaaagaaaaatcgattccctaagtagcggcgagcgaacggggaagagcccaaaccaagaagcttgcttcttggggttgtaggacagaacattggagttaccaagttaagttgtaatcgaatcagctgggaagctgagtcaaagagtgtgataaccacgtagattaaacaacttaacctccgttctggatcctgagtacggcggaacacgtgaaattccgtcggaatccgggaggaccatctcccaaggctaaatactccctagtgaccgatagtgaaccagtaccgtgagggaaaggtgaaaagcaccccggaaggggagtgaaatagatcctgaaaccgtgtgcctacaattagtcaaagctcgttaatgagtgatggcgtgccttttgtagaatgaaccggcgagttacgtttatatgcgaggttaaagtgaaaagctggagccgtagcgaaagcgagtctgaaatgggcgagtgagtatatagatgtagacccgaaaccaagtgacctacccatgtccaggttgaaggtgtggtaaaacacactggaggaccgaacccacgtcagttgaaaatggcggggatgaggtgtgggtagcggtgaaattccaatcgaacttggagatagctggttctctccgaaatagctttagggctagcctcggaatattggatcatggaggtagagcactgtttggactaggggcccgtcatgggttactgaattcagataaactccgaataccattgatttagttccgggagtcagactgcgagtgataagatccgtagtcgaaagggaaacagcccagatcaccagttaaggtcccaaaatttatgttaagtggaaaaggatgtggcggtgcacagacaactaggatgttggctcagaagcagccaccatttaaagagtgcgtaatagctcactagtcgagtgccgctgcgccgaaaatgtaccggggctaaacataataccgaaactgtgggtggacacgtaagtgtccgcggtaggagagcgttctaagggcgatgaagctagatcgtaaggactagtggagcgcttagaagtgagaatgccggcatgagtagcgaaagatcagtgagaatctgatccaccgtatgactaaggtttcctggggaaggctcgtcctcccagggttagtcgggacctaaggcgaggccgaaaggcgtagtcgatggccaacaggttgagattcctgtactagtttattttgtttgaacgatggagggacgcaggaagctaaggaatgcacacgactggaaatgtgtgtctaagcaacaagtcttgagttgagtgaaatgcttgattctttaaggacaagttgtgatggggagcgaaattaagtagcgaagttcctgatgttacactgccaagaaaagcttctagtgagaaataaactacccgtaccgtaaaccgacacaggtggtcgaggagaatatcctaaggtgagcgagtgaactctcgttaaggaactcggcaaaatgaccccgtaacttcgggagaaggggtgctgaccgtcaggtcagccgcagtgaataggcccaaacaactgtttatcaaaaacacaggtctctgcaaaatcgaaagatgacgtataggggctgacgcctgcccggtgctggaaggttaagaggatgagttagcgtaagcgaagcccagaattgaagccccagtaaacggcggccgtaactataacggtcctaaggtagcgaaattccttgtcgggtaagttccgacccgcacgaaaggcgtaatgatttgggcactgtctcaacgagagactcggtgaaattataatacccgtgaagatgcgggttacccgcgacaggacggaaagaccccatggagctttactgtagcttgatattgagtgtttgtacagtttgtacaggataggtaggagccgtagaaatcggaacgctagtttcgatggaggcgttggtgggatactaccctaactgtatgaccactctaacccgcgccacttagcgtggcgggagacagtgtcaggtgggcagtttgactggggcggtcgcctcctaaagtgtaacggaggcgctcaaaggttctctcagaatggttggaaatcattcgtagagtgtaaaggtataagagagcttgactgtgagattgacaaatcgagcagggacgaaagtcggacttagtgatccggtggttccgtatggaagggccatcgctcaacggataaaagctaccctggggataacaggcttatctcccccaagagtccacatcgacggggaggtttggcacctcgatgtcggctcatcgcatcctggggctgtagtcggtcccaagggttgggctgttcgcccattaaagcggtacgcgagctgggttcagaacgtcgtgagacagttcggtccctatccgtcgcgggcgcaggaaatttgagaggagctgtccttagtacgagaggaccgggatggacatacctctggtgtaccagttgtgccgccaggcgcatcgctgggtagctatgtatggacgggataaacgctgaaagcatctaagtgtgaagcccccctcgagatgagatttcccattcctttatggaagtaagacccctgaaagatgatcaggtagataggctaggagtggaagtacagcgatgtatggagcggactagtactaatcggtcgaggacttaaccaaaggtgcaatgttaggcttttgaaatgaaatattacttattatgcagttttgagagaacgaagttcttctcagtgcgcaagcacaaaatagtgtggtggcgatagcaagaaggatacacctgttcccatgtcgaacacagaagttaagcttcttagcgccgatagtagttggtgggaaactacctgcgaggataggacgttgccgcgctttttcattccggtttagctcagttggtagagcgcatgactgttaatcatgatgtcgtcagttcgagcctgacaaccggagtcaattatttggagagttgtccgagcggccgaaggagcatgattggaaatcatgtaaatgggtctaacctgtttcgagggttcgaatccctcactctccgttaaataataaatgacatggcccgttggtcaagtggttaagacaccgccctttcacggcggtatcatgggttcaaatcccgtacgggtcatttttttggaggtttagctcagttgggagagcgtctgccttacaagcagagggtcacaggttcgagccctgtaacctccattcggtcgcatggtctagctggttaggacgcctgcctgtcacgcaggagatcacgggttcgagtcccgttgtgaccgtcttaaaaaaagcgtaagcaatttattgcttacgcttttttgttgtttaatcattttaattaaagacgccagtgattaatagcaagtatccaaactcttgtaaatagcagttacgtttgattaggccgagttgtaacgcaattaataataactggccacctgcaaagagaattaaatgccaaccgtgaattaaatgcgttaaaatcactgcaataataatgcacgcccatactacataactgaggatagtaatcatccgattgtgagtcgttagttcgagaagataaatgatgattaagaataggcctaattttacgagtaaatcctcggggataaagtgaatgccactgaaaatctgagtaattaaaaagaaaaatggggctagtaagaattgaaatgataaccgtaacgtacggtctttgaactggtctgggtagataaaagggattagaacaaaaatgctagtaatccctgatagaagcccaatcaaaggtagatcacgccagccgatgattgcggctagaataattgcgactaaaagggcagcagttgcaattattcgctttggtttataccggggtgataagacgagtaaaatggctaatagcgcccctagaatcgcagttagataaaatgaaagcccgaattgctttggaaaagaccacattgtcagcccgacgattaaaccgagatttaaataattaaacaaagtcagtaattgtggctgagttgaagcctttagatgttgttggttaaggtagaacaatagcaacacttctttcttagaatatgtgtctcatcttaactttttttgaaaagaaggtcaacggcttttgaaatggattgtattttgtgctaggatagtagagttataagaagttcccgataggattcacacaccgtgaagaggccttgtaaccgacacatatatagggggaaacatagaaatgcaagaaagacatttatttacttcggaatccgtttctgaaggccatccagataagattgcggatcaaattagtgatgccatcttagatgcgatgttagcacaagatccacaagcacgagttgcttgtgaaacaaccgttacaactgggttagtcctagttgtcggcgaaatttcaacaacggcatacgttgatatccaaaaagtggtcagagagactattaaagggattggttatcgtgatgggcattatggctttgatggcgataactgtgctgtgattgttgcacttgatgaacaatcacctgatattgcacaaggggtcgacgattcagttgaatctcgtgcaaaggatgaagatccacttgataagattggtgcgggggatcaagggttaatgtttgggtttgctgtcgatcagacaccagaactaatgccgttaccaattgccctttcacaccgtttaatgcgcaaagtcgctgagttaagaaagagcgggcaactcgcttatctaagaccagatgctaaggcgcaagtcactgttgaatacgacgaaaacgaacaacctgttcgtgtcgataccgtcgttatcagtacccaacacgatgcagatgtgactttagaaaccattcaaaaggatatgcttgaacaagcgattcaaaccgttattccagccaaatacttggatgatcaaaccaagtatttcattaatccaactggtcggtttgtcatcggtggaccacaaggcgattcaggtttaactggtcgtaagatcattgttgatacttacggcggttatgcacgtcatggtggcggtgctttctcagggaaagatgctactaaggttgaccgttcagcaagttatgcagcccgttacattgctaaaaacattgtagcggctgggttagcgcgcaagtgtgaagtgcaattggcctatgcaattggtgtagcgcaacccgtttctgtttcaataaatactttcgaaacagggaccgtcagtgaagaaaagattcaaactgcaattcgtgaaaactttgatttacgaccagcagggattattcaaatgttagatctacaaagacctatatacaagcaaacagctgcatatgggcactttgggcgtacagatgtcgaatttccatgggaacgtttagataaagtggatgccttaaaggcaagtattgctaaactaaatgcctaatgtattattagacgagtaaaagaggcggcctttccttagcttatttgagttaagaaaaggctctttttatacccaagaataagagagggagctaagaatggaacaaagtaagggaagaaaaacgaatgtattactcgtgacgattgcgattttcgtcgcaactttcatgacagccattgaagggacgattgtttcaacggcaatgccaaccatcattagtaatttacacggtatgaaattgatgaactgggtcttttcaatctacctattaacgaatgcgatgatgacgccaatctatggtaagatggcagatcggattgggcgtaaaccaatcttcatctttggtttggccttgtttgtcatcggatcatccttatgtggattgtcaaatcatatggggacgttaattatttcccgggcaattcaaggcttgggagccggggcgattatgccggtatcatttacgattattgctgatatttatccgattgaaaaacgggcgaaagtcttgggttttaatgggtcagcatgggggattgcctccatcattgcgccgcttttagggggcttcattgttgataagttgacctggcattggattttcttcatcaatgtaccgattgggattattacgattggtttaatctggtacttccttcaagaagagaagaagacgagtgctgaaccagtcgactattggggcagtttatggttgatggcggcccttttgagtttactatatggcttccaagtcatgggtgaagccaaaccgtcagtgctcgttttagggtcaatgctcgtgattgcagtggttgctttttacctctttatccgcgttgaaaaacatgcacaagatccgattatctcattatcattatttaaaaatcgaacatttgttgtccaaaatgcagtggctgctttagtgagtggtttcttaattggttttgaagtctatatgccaatgtggatgcaagggatcctcggattgaaagcctcgatggggggctttgttgtgacgcctagttctgtgatgtggatttttgcctcattatgggcaggcctattacttgttaagcacgcaccacgaacaattctagccggtagtttgtgtattttacttgttgggagcttcatcttagcattggtcccacaaaccacaccgttttggttcttcttattagttgctgctggtttagggattggctttggcttaatcattaccacgacgactgttacggcacaaagcgttgctggtgctgacaaagttggtgttgcaacgtcgtttaatacgttaagtcgaactttaggtcaaaccttgatggtttcagtttatgggattattttgaatcggcaattggcaaaagggattgctggtgatggtcgattagatcaaaacatgttaaatgaattgattaatccagaaactgctttgaacttacctaaacaattattaccaacattacgccatattctatacaatggtttacacttcatttattttgcgtcaattgtgttaattgccattgcaattattattaatttaatggatcgtaaaagaagtaaataaaaaagattgaccaatacggtcaatcttttttattttaatggaataagacacagacgccttcaggtgtttctaagtctttttgacaggcggttaataaaccagtttgggcatcgcgccgataaagcgtaccattatcactattttggttaacggctaatagaaaatcgtcgttagcggaaagattgaagtcacgggggaattcaccatccgttgacatttgttggattgctcgtagttggcgactgtcatcactgatggcatacacaacgattgaattatacccacggttggaagcataaaggaaacgaccgtctttggaaacacggattgcagcgccgccgtttgtttcatgccaatctgcaggtaacattgagtaggtagcaaccgcgctaaaagtcccatcggctgcatgataatctaagaccgtcacttcactggacaattcacccaataggtaagctgtcttgtgattgggatggaagactaaatgccgtgtgccaaaaccaggttcactcttgtaaattgctactttggttaattgaccagcattgtcgacggcataagttactaattcatcggtgcccaaatcacagaccactaagcggtggtcaggtgttaggtcggtataatgtacgtgggcgctagcttgttcaggacgcggaccgtggccttcatgaactgtcgtgctcgctaaggttaaactgccatcggcttggatttgataaacgagtatttcgcctttatggtaattggctgcataaacgagttggcggtcttcatcgactgccacgtatgctggtggtgcgccggctgctaagaccgcgttcaaaaagacaggggtgccactagctaagtcataggcagcaatcccaccttggtccccatctttaatgacggtgtagaggatgttgcggtttgaaatcgttaaataggatgcgttatcgagattaatgaatggttggatgtcactcacggttgcagttgttgcatcgaaaattccgcggtagatccctttaccaatccggcgggtataaccaccaattaaaacttcttctgtcataatcagactcccttcgtcaaatactctttgagtatagcatattcctgcgaaaacgatttaatttgttactaaaaggattcactagtcgctaaaactaagtcgcgaatatgctacaatgatactatcttaactaagaggagatttcattatgaacacgcaagcagaagtcatttcaattggcaacgacgccattgatgatcaagaaccgatggtcattttattcgatgaacatgcgacaactgccattcaaaacgtggcattgattcaacattttatggacgaagcggccaaaaaacagctaacactgacgacagattctacggttattattaatcaacaaccttatacgattacgtatgtgggcgcgttggtaaatcctaacctcaacagtattggtcatgtcgctttagtttttggacctgcgccacaagaagatcaactgcaaagtgggctttatttaacaccagccgccgcgggtgttccggctgttcctgaattcaaagtaggaacgcagataacgtatcaagaaactatgtaggaattaggtgaattggtgtgacagagaataaacagccacaaacagaacgttcatggttctttaaatggtttttaaataagaagctaccgattgttttgttaaacatgttattaacgttgctgattatacttttattaacaaaacttgcttggctgttaaaaccaattcagtcgttgatgttgattatcgggttaccgattattattgcggccgtcttgtattacttgaccaacccgttaattgattggtttgaacggcgttggcatttaaatcgggtattgtcgattacgattatttttattttaattgttggcttactggtctggggaattgcgacgattattccaatcattcaatcccagacaacgagtttaattgatcagtggccgtcttattgggcgaatattcaaactcagacgatgaaatggtttaacgacccagccttcaaatcgattcaaaaacaattaaacgatatcaatacggatgtgtttagtaatttatcaagtaaagtaaataaaatgctgacttcgaccgttagtcatattggaacagcggtcggagtggtgacgaacgtagtcatcgcgattgtaacgatgccgttcattttattcttcatgttaaaagatggtcaccgaatgaaaggctatttgttaaaattcttcccggttaaagtacgcgccacaactgggaaagtgttggaagaaattaacacacaggtcagtcagtacatccgcggccaattgacagtagcgttttgggttgcagtcatgtttactgtaggctactggattgttgggatgaagtacgggttgacgttgggaattttagcggggattttaaacttaattccgtatttaggctctttcctagcgatggtcccgtcagtgattattgcagcgtttatctcgccgttattattgattaaagtactcatcgtgtttgctgttgaacagaccttggaaggtcgtttagtttccccattggtcttggggagcaagatggcaatgtatccggtcacgacaatcattgtgttgctggcttcaggaaagttattcggccttgccggtgtgattctcggtattccagtatatgcgattatcaagatattaattagtcacctttttgaatggttcaagtcagtttcaggcttatacgagcaataaaaaacgcacgatccgtaataaatgcggatcgtgcgttttttggtttttagagcgttaatttcatgtagtggtgggggatgcccgcttccatttcgccttcgcttgtgacaataaagcctaatttttcgtagaaaccaatggcgtggtcctgtgcgaataaaataatataaggcgttgtggtgcgtttagcgtcttcaatgatggcttcgattaattgatagccgagtccttggccacggaaagctttgatggtagcaacgcgctgaattctaaatccaccgtcttttaagacgtgcacgcgtgcggttactgctgggtcttgattgaggtaacctacatagtgaatcgtgtgatcttcgtgcgcatcgatttcctgtgtttccggcatattttgttctcggacaaacaccgttcttctaatgtatgttgcatcacgaaagataacactgttatctccaagtgtatgtttaatatccatttgtttcacacccttttctgatcaatgtagacgctaaggttaaaagcgacacgggtaattatacagttgtttcaagtcggattcaaccatttcagagaagttttaggtacctaactaaaaagagccaaactaccgatttaaaaggtagtctggctcttttaactgctttttaaagcatgtcaccattaaaaattgaatggcgaacaagaacgtaatcgactttcttcaatgatgataagcgtttaccaccagcataagaaatcgatgattgtaagtcttggcgcatttcggtgagcgtgtcactaatcgcacctttataaggcactaaaatccgtttgccctcgacgttttggtgtgtgcctttttggaattctgaagctgacccaaaatattctttgaattgttgaccatcttcttcgactaatttgccaggtgattcagcgtgtcctgcaaagagggacccaatcattaccatgctagcgccaaaacggattgatttagcgatgtcaccgttggttcgaattcccccatcggcaataatcggcttggtagcagctttcgcgcaccatctgagggctgccagttgccaaccaccagtcccaaagccggtcttgattttggtgatgcaaactttaccagggccaatcccgactttggttgcgtctgcacctgcgcgttccaaatcgcgaacggcttcaggggtaccaacattgccggcaatgacgaaactcttaggcagtacttttttgatatgttgaatcatatcgatcacgacttgtgagtggccgtgggcgatatcgattgtaatgtattctggtagtaagttatcggttgcgagttgattaataaagtcgaattcatcgtctttaaccccgacactgattgaggcaaataagccgcgctcgtgcatcatcttgatgaatgcgggacgcttttcaggctgaaatcgatgcatgacgtagaagtaatggttttcggcaagccagatggcaagcggttcatcaataatcgtctgcatgttagcagggacgactgggattttaaacgtttctgagccaaagcggacgctagtatcaatctcgctccgacttttcacaatacatttattgggaatcagttgaacatcttcgtaatcaaatacgtccattgggaattctccttaaaaacgaacatttattttggataacacggaatttatccgtgcataacgtataataacgagcttttttatgaaagtcaaataaaaaacacattcgaacccaaagaatgggagaatgtgtttgatgatagtggccttttgtaagttaaacgggttctaatccgcaggagctggcacacgctctatttaatgtaccgcttgcgccagaagcgatagactagcacaccagaaatgatcagggaaatgaataaagtaatcaaccaacttgttttggagcgagacagtggaaggtccacgttcatcccgtaaaaactaaatactaatccggggatggtgagaataattgaataagatgccaagaacttcataacactattcatgttattattaataattgacgagtaagtatcggctgtttcgttaataattgtgttggaaatttctgccatttcgatggcttgttgattttcaatctgaatatcatcaagcaattcaatttcatcttcattaagatctaacatattggtccgcattaaactagcgagtaccattttatcggtctttaaggacatcatgaaataaactaagccgcgttgaatggtcatcagatcgaagagttcttcattctgtagggaactctgcaagcgagtttcgatttgttcacgagagcggttgatgtcccgcaaatattggagatagatggatgaaatgcggaagagaatctggaggacacttctacggtgattttgtggattgaaacctttaatttggccatcaacaaagctctgtaaaaaggtgactggcgttttgttgatggttaagacggtcgaatctgttacaataattcctaagggacttgttttatagaggtatttatctggtttttgcgggtctttttcaagaattggtatgttgaaaataatcagggtcgcattataatcaggatcgtgctcagcacgcgcactttcatcagcatctaaactatagtagataaaatcagatgggatgtggagcttcttagtgagaagctcaatttcttcagtcgagggatcagttacgttaatccaactgttggactggattttagcatgtttggtgagctttttcttagcactgtcgaagcgataggtttcgagcatggtgtcacttccttcatcaataacttactgttaagtctactggatattttaagaatgtaaagtgcggtataaaagaagtgcgttcaaaccgggtatcctttgaggattaacctagtctcgtgaatgagcgacagcgtcgatcgtttgctggacgtagttaaccgcaaaaggatggtttgaaagtacgttaagaaaagaagtgcgtcaaaagcggttatcctgtgaggattagcctaattagacgaataagcggcgtagccgattgtttggctaatgtagctaaccggaacgggatgcttttgaaagcacgttaaatcaaggagaatcagaaatttgaaaaaaattgagttagccaagcagtttttaacgacgaacttggccgtattacaatgtccaatctgtcaggacgtatttgcaagtgtagccgagcaccaattactttgtgtcaatgggcatagttttgacctcgctaaaaatggcacgttatattttttagcaaagcaaatgaagtctgaatataccaaggaaatgttgcaacatcgccgggcttttttacaagcagggttctttcaaccgttcttaaaagaaattgcatcacggattacccccgatagtttagtccttgatgtcggttgtggtgaaggaacgccagtgcaacagctcaatgcgcaagtttccgcgcgttatatcgggtttgatatttctaaacctgcgattcaattggcaagtgattacaatgccgatgcgtggttttgtgcagcagacttagcgcggatgccatttgctgatcaccagttagatacggtgctcaatatcttttcgccttcgcaatatcaagaatttaaacgtgtcttgaaaccgggtggtcaactaattaaggtggttcccaatgcgggttacttacatgagttacgggagttactgtatcatggtcaagctaaggaaagctatgatcatggtccggtcttagaattgtttgcgcaacattttccagattatcaagaaatgcaagttcaaaaaacaatgacgttaacacccgagacattgcgcgatttggtcgaaatgacgccattgacgtggacggcttctaaggcacaattagcggcaatcacgttagaagcgctacctgaaatttcattagatgtcacgattttagtgggaaaatgatgagaatttaaagaaagtttaaaaatctgattgcaactctaaaataagggcgctataatgtttttaaggaattttttccctaacttttatcagaatttattttgataaaagctagtgatgaaatgacactaacgtagtttctcgccgtgaataaccgagggactacgtttttttatttgcaaagcaaggtagagcttttgtgaattctattgtataattaatctactgaatcttttttaaggaagtttagaccgtgactaatcatattgtattatacgaaccactgattcctgccaataccggtaatattgcgcggacatgtgcaggaacagatactgttttagatttaatcgaaccattaggctttgaaaccgatgataaacatttaaaacgggctggtcttgattactgggaccaagttaagattaattatcacaagaacttggatgcctttttagcaactgtgcccgatcgtcaatatttatacttgattacgaagtttgctaagcaagcttattctgatcaagatgtgtcggatacaagtgttgatcattattttatgtttggtaaggaaacgaccggattacctgaaactttcatgcgtgaaaatgaagatcggtgtttacgaatcccaatgtccgaccatattcgagcattaaacctctcgaactgtgcggcattagtgatctttgaggcattgcgccaacaagattttccaggactcgaaaagagtcatttgtacgacaatgataaattaaaatagggagtgtttttgatgcaaacgaagaaagatccaattactgttgatgcttttcattatgaccgtgtttcacctgatgtagaaccacaacaaaatatccaagtcagcttagtcaccatcagcgaagaagatccatatttacaagaagctgatttgagcgcggggaatatttaccaaattgtgacgcctttccaagttgcaccagaaaagagtggctttgcagtgtcaggtcaaatttcacaagtggttcaactcttagatttctttggtgaaccaaatgaaattgatcaaaaagacatgatgaagctttcacgaccattgattgaatacatcgaaacattgacgtatcaagtgacggcggttgctttaaatcggggcgttcaactccaatttacagcgcaagccaacgaagactaatcagcgaaaggttgcggcaattttgccgtggccttttttagtaccgtgattaaaaacggtacgggactgacatttatgggtttagtagtacagatgttcgtgtataatggatagtaggatttaaggttgaaggagattttcatggccactaaaagtaaaaaaagaaaaccagcagcacgcaaaaagaaaaaacaacaaactgatttcacagttaacatcatcgggtttatttttattttaattagtttatttgcgggtttaaagctgggctttatcggcgcgctttgcgctaacgtattccgtctgtttgttggcgatacgttcattattagtgctattttattcgcccttttgggggtctatttgttgatttatggcaagcagccccccttatggcaccaaaagacgcttggatttgcaatcgcgtatctcgggattttaatttggttgtcagcattcgtcttgcaccatcaagcggtcaataaccatttcttggccgccacatggcagcttttattggaagacttccagaagatggccgttacgacggaagttggcgggggcttaattggcgccgcgttgtatggtgttttccacttcttgttcgcgcagatggggacttatctgatagccgtcttgattgtgattatcggcgtttttgttttcttagatattccattcagcgtcgttgttcagagtacacaacggtttgtgcatgggctctttaaagctggcggctacacgaaatcagggttccaaaaggtctctgaaaaaggtaaagcgcaagtcagtgctttaaaagaacagacgcaaaaagctgttcaaaatgcaactgaacaagcagaagagacgtcagagactaaagagcaaatggtcgcaacggatggtccagaaaatgcaccgaagcaaaaattggaaccttttaaaataaacggtcccaaggatctaccaaaaccaattgcgacgcaagcagaaccaactgcacccgaaccggtggctgacgaagatgagcatgttccagatgtggcagaactcgcaccactgaacgagacggatgatgattacgaattgccaacaccagcattattaacgcaaattccggcgtctgatcagagtgcggaatataaagccatcgagaagaatcaacaggtcttgaaacaaacatttgattcgtttggtgttgatgtgacggttaagagtgctagtctgggaccagccgtaacgaagtacgagattcaaccggcagttggggtgaaagtctctaaaattgttaacttagcggatgatttggcgcttgcattagcggcgaaggatattcggattgaagcaccaattccaggtaaaccgtatgtcgggattgaagtgccgaacacgaccgtttcgaccgtttcctttagagaaatgattgaacaagaacccccacatccaggcaaaccactcgctgtgccgttaggtaaagatatttcgggtaaggtcatcatgtcggatttagccaagatgccgcatttattaatcgccggttcaaccgggagtgggaagtccgttgcaattaacgggattatcacaagtattttaatgagtgccaaaccacacgaagttaaattgatgttaatcgatccgaagatggtcgaattaaacgtctataatggcgtgccccatctattgattcctgtcgtgacgaatgccaaaaaggctgcgaacgccttgaacaaggttgtaaaagaaatggaacgacgttatcaattatttgccgatacaggtcagcggaacatgattgaatataatcagtatattcaaggccacaacgaagacggcgaaattaaaggtgcaccactgccttatatcgttgtcatcgtggacgaattatctgatttgatgatggttgccagcaacgaagtcgaaagtgcgattattcgtttggcacaaatggctcgggcggcggggattcacatgattgtcgctacccaacgcccatctgtcgatgttattactgggttgattaaggccaatattccatcgcggatcgcgtttgctgtatccagtgggattgattcacggaccatcttagatggcagtggcgcggaaaaactgcttggccgtggtgatatgctttacatgccaatcgggatgagcaaaccattacgggtgcaaggcgccttcatttcgagtcaggatgtcgaaagtatcgtgtcgtttattaaagcacaacaaacggctgaatacgacgaagaaatgattccaaccactgagcaggaaaagcaatcaactgaagaaccagaagatgaatattaccaagaggcagtcgaattggtcgttaaacagcaaaccgctagcgtatcaatgctccaacgccgttttagagtcggctataaccgggctgcacgcttggttgatgagatggaaagccgtggtgtgattggaccatcagaaggtagtaagccacgcaaggtgttattacaaaacgtaccagaagaaccaacagaacaatagcgtgtgacataagtcaaatatcgcctaaaatggcgaataagcgcgtcagcgattgattgacattcaggattaactgaaaggcgctggttgatggaactcggttaaactattaaatgaaaaaggccgcgacaaaaaatacttttgtcgcggccttttttgagttcaccttctttttttggtatgatagaatccgtgctatgaaaaaggataagttgaaaagagccattttaactgttgaaacagtgaggagtaatataacgtgaatcagaaaataacggatggcgtctacctgaatattttacaaactaaccaatttaaaacaattagattaaccgttcaattaattgcgcccgtcacagctgatgggatgacccgacgctcattattagcgagcgttctaggtgctagtagccaagcctatcgtgaccaagtcgcaattgcgaatgaattacaagccatgtatggtgccggctttaatatgaatgcctatcgacaaggaaacttggcgatttttagcatctcaatgcgaattgtgagcccccaatatctacgggatacaatcgacttgcaagagcaagcgattgcgtttatcgggcaattattattgcatccagatgtggttgatggccagttcaatccggtcatttttaaccgtgaaaaagagaacttagtgcgttacatcgaaagtgttgccgatgataagcaatcatacgcggcggttgaattacgcaaactctattttaaagatgcgacgcaacaaattcccaattatggggatgcagctgatttagcaaccatcataccggatgaactatatgcgtattatcaatcgatgattgcaaacgatcgggtccaaatgacgtttgtcggtaatatcgacgaagccaaaacggtcgcggatttggcacaattgccatttgcaccgcgtaatgctgaactgccaacgattttttatcaacaatcgttatatccacaagtgcaaactaaaacagaagtacaaacggtgcaacaaggcaagttaaacatggcctatcaaatgccagcttacttctatcaagctgattattatgccacaatggtgatgaacgccttattcggtggcacaccgctgtcgttactttttaccaatgtgcgtgaaaaagcgagtctagcctactatgcctcaagtgcaatcgatgcttttcggggtgtcattacggtacagactgggattgaaagtcgccaaaaagatcgcgtcttagagattatcgaagcccaacgtcaacggattatcgcgggtgactttgaacaggcggtctttgaacaaactaagttggccttgattaatcaatttaaatcgagtctcgatagtgcggcctatttggggcaacaacaatttaatcgtttgtttgtgcctgaaactgaaattgatgcagagcgatttacacaggccatcttggcggtttctaaacaagcggttcaagaacaagccgcaaagatgcaattgcaagccatttacttcctgaaaggggtcgatacagatgaagcttagacaaaatccccgcttaggtgaaaccctctatgaaactgaattagagaatggcttgaccgttaaaatataccctaagagcggttatcataagacatatgcaatcttaacgacgaattatggttcaatcgataagacgtttatcccagctggggaaacggattatgtgacagtgccagacgggattgcgcattttctggaacataaattatttgagaaaaaagattacgatgcgtttgaaaagtttggtcgctacggggcaagctcaaatgcgtttacgagttttacgcgaacgagttatttattttcaacaaccagtcacttgcaagaaaatttggatattctacttgattttgtgcaggaaccttatttttcaactgagacggtcgaaaaagaaaagggcatcattggccaagaaatccagatgtataatgatgaaccggattggcgcttattctatacagtgattggcaatctttacccaagccatccggtgcggacagatattgccggcacggtcgagagtattgcgcaaattacaccagaagcgctctatcaagcacatgcaacgttctatcagcctagtaatatgaacctctttatcgttgggcaaattgatgatccggatgaagtggttgattggttgaacgccaatcaagcggcaaaaacatttgcccaaccaacagaaattgtacgttcattgcctgaagaagctgaagatggtcatgatatcattccgtatcggtcacttgaaatgccaattacgcgtagcaagagcatggtcgggattaaaggtttaacggattacggaacaggtgagttagcacttgaaacaaagttgaagatgaacttgttacttgaattgctatttggtgattcatcaacgcaagtgcaaaagttgtacgatgatggcacacttgatgatagttttggttacgaatttgccattcaacggtcatttaattttgtgacccttggtggcgatgcggacaatgcccaagaattatcggatgcgattattaatatcttagaacatgccacggaaagtcctgacttttcagaggataacttggcgttggttaaaagagccgcaattggtgaatacttgcaagcgttcaattcgctagaagccattgcgaaccaatatagtgatgaattctttaccgaaatcagtccatttgatgtcttaggtttgatcgaacaagtgactttagcggacttgcaacagatggcaaccgattatttcaaaattgaaacgatgacagtctgccacatcttaccggagggagcaaaccatgcctaaatcagccttaattatcggtgcatccggtgatattgggatgacggttgcgactgaaatggcggcggacggttggtcgctttatttacactatcatcaaaatcagacgcgggttacgacgctgcaaaagcaattgttgcaagactacccaaaacaggatttttttgcgcttcaagctgatttaacccaagaggacgctgttggaaaattgacaggccagctttttcaagtcgatgcggtcatttatacagcaggtgcgacgacgtatggcttattgccagaggtcagtgcaacggcactcgatcacttatggcaggtgcacgttaaagcaccaatgctattgatgcagcagctgcaagcgaaactagcgcaaagtccattaggacgcgtcgttttaattggttcaatctatggtggccggggcagtgcaatggaagtgccatatagtacagttaaaggcgcacaatccgcctttgtgaacgcctatgcacaggaagtggcatcgcttggaatcacaattaatgtggttgcaccaggcgcagttgatacgaaaatgaacaatcagttcacaacagcagaacgggctgctgttgtagcggagatcccggccggtgcttttgcaaccccagcgcagattgcctattgggtattgagtttaatggcacctgcagccgattatatgacgggacagacattgtacgttaatggtggttggttaaaataaagaaatcttaataatgcacatacgtaccaatatgctataattatggataatgatactgggataatagtgggtggaattgattatgaatgaaattggtcaaaaattacgtgaagcacgaattgaaaagggctacacactcgatgatttacaacaaatcacaaaaatccaaaaacgatatttaatcgccattgaagagggcaattttgatgccttgcctggcagtttttacgtgcgggcatttatcaagcaatacgcccaaacagtgggcttagataatgatgcattgttggcagaataccaagatgctgtaccagatacgaaaccagaagaatatgttgaaaaatccgttgaaaatcaaacccgattgacgcgcgaaacaacagattctaaatggtcgaaatggcgcaaccttgtcccacaaattacgattgtggcaattgtggtcatcattattggggtggtctatgggattgcgctcagcaaccgtggtaaagaccgcgaaacgttaaacgaaacaagctcatcggttacggtttctggggataaaccagatcctaagaaggataacagtagtgaagacaagtctgctgaaagcagtaagaaagccgcttctgaaagtaaggcacaagaagctagcaagaaagctgctgaagataaggctaagaagcaagaattaacggcgaagatgaccagcattaatgggtcacaacaagcttttgaaattaagaacttgccagctaaagccaaccaaattacgttctcagctgataaatcagctgcttgggtcagcttaacggccaatggccaacaaatttggcaaggttctgtcgcagttggtgccgaacaaactgctgaattacctgaaggcgttacgcaatttagtattcaaactgggaatgcacctgcaacgaagatgaagattaatggcaccgatattaaccttagtccaaataacgaagcaacgtttgtgcggacgattaatttcacagcaacattggctaaataaaggacattaaggagtcttcaacatgaatttaccaaataaattaacgatgtttcggattattttgattccgatttttactttgattttagtattggatgtgcctgcgacagccattatggtcgctgggacaagtattccagtcagtgcgattattgcaacagtgattttcattgtagcctctttgacggacttactggacggcaagattgcccgatcacaacatttggtgaccaacttcggtaagtttgctgatccattggctgataaattattagtgatgacagcatttatcttcttagtggcgctagatcaagcgccagcatgggtggttgcgattattatttggcgtgaattagccgttactggcctacgtttattattaagcgaaggtggcgaagtgatggccgcagctatgccaggtaagattaagacgacgacgcagatgttagcgattattctattgctactcaacaacgtcttctttaacaatatcggcattccaatggcacagatcatgttatacgtttgcttgttctttacagtttattcgggtaccgattatttcatcaagaacagaggcgtctttaaagactcattttctaaataaacttaaactggcggggaatcccacgccagtttttttaacccaaaaagcacgaaaaaaacgcggtgattcgggtatagtagagtagcttaaaaaatatatagaacgtttgttcgatttttacttgcttttatttcgtgaaatcggtaaactaagagagtactgaaaaggactcttttgaggagggcacttaattggctaaagatgaaagacaagcagccttagatgctgcattaaagaaaattgaaaagaattttggtaagggctcaatcatgcgaatgggtgaaaaggttgatacacaagtctcaactgtttcatctggttcccttgcattggatgaagcgctcggtgtaggtgggtatccacgtggccgaatcgttgaaatttatggtcctgaaagttcaggtaaaacaaccgttgccttacatgctgttgccgaagtgcaaaagcaaggtgggactgctgcttatatcgatgctgaaaatgcaatggatcctaagtatgcaactgccctcggggttaatattgacgatttactcttgtcacaaccagatactggggaacaaggcttagaaatcgccgatgccttagtttcaagtggggctgttgatattttagttgtcgattcagtcgcagccttagtgcctcgtgctgaaatcgaaggcgaaatgggtgacgcgcatgttgggttacaagcccgcttgatgtcacaagccttacggaaattatcaggaacaatcaataaaacaaagacgattgcgttattcattaaccaaatccgtgaaaaagtcggcgtgatgttcgggaaccccgaagtcacacctggtggtcgcgcattgaaattctattcaaccgttcggcttgaagtccggcgtgctgaaaccatcaagaatgggaccgatatgatcgggaaccgtgcgcggattaaagtggttaagaataaggtggcaccaccatttaaagtggctgaagtcgacattatgtatggtcaagggatctcacaaacgggtgaactggtcgacatggcggtcgaaaaggacattattaataagagtgggtcatggtattcctatggggatgaacgcattggtcaaggacgtgagaacgcgaagaattacttggctgatcatccagaagttcaagatgaagtccggcttaaagttcgggaagcatatggtatttcggatgtcccagtagatgaaagcgatgaaacacaactcgacgtctttacggatgacgattcaaacgaataagaatcattaagctgaggcaaaagttattttgcttcagcttttttgattgcttaaccgaattattctgatggtcgatttgattgactgaactcgaaaacggttgcaatgccgatagtttaagttgacaggcggtttatgaaactataaaataactatgtgttgaaaaactaaacataataacatctttaaaaatttgcagtgaaagttgcaattcaaaatttttgatgatgcggaggtgaaacaatgaacttagcttttccattaatcctcgcagtcatcatgttaatcgttggtttactagttggttccgttctacaaaagaaggcgcacgaacgtgaaattgatggtgcaaataagactgccacaggaataatcgcagcagctgaaaaagaagccgcaacgcggaagaaagaaattcttttggaagcaagggatgaaaatcaccgctatcgttctgagattgaaaatgaattgaaagatcgacgcagtgaggtacaaaagcaagaaaaccgtttgattcaacgggaagaaacaatggatcgcaaagatgcaacgttggataaaaaagaacgttcattggagcaacgtgaaaatcgtttaacgaatcaagcacaagagctaactgaaaagcaggcagaagctgccactttagttgagcaacaaaaagcgaagttgcaagaaattgccgaattatcgcatgatgaagcgcaaaaaatcattttggatgaaacgaaacaagaccttgaacatgaacgggctgttttaatcaaagaaagtgaagaaacagctaaagaacaagctgatcggactgcgcgtacattagttgctgaagctattcaacgcagtgcagcggatatggttgctgaaacaacagtaactgttgtgacgttaccaaatgatgatatgaagggccggattattggtcgtgaaggtcggaatatccggacattggaaacactgactgggattgacctgattatcgatgatacgccagaagcagttgtgcttagtgggtttgatccgattcgtcgcgaaattgcgcgcatgacattagagaagttaattcaagatggccggattcatccagctcggattgaagaaatggttgataagtcacgcaaggaaatggacgaacaaatcagacaaatcggtgaacaagcaatctttgatgttggtgtgcacacaatgcatcctgatttaatcaagattcttggtcgattacatttcagaacaagttacgggcaaaacgtcttgaatcattcaattgaagtggccaagttaacggggattttagccgctgaattgggtgaagatgtgacactcgctaaacgagctggcttgttacacgatatcggtaaggccctcgaccatgaagtcgatggctcccacgttgaaattggggttgaactagcaacgcgttataaggaaccggcaacggtgattaacgcaattggttcacaccatggtgatactgaagcaacatcgattatctcagtcttagtcgcagctgctgacgcgatttcagcggctcggccgggtgcacgttctgaatcacttgaaaactacattcaccgtcttgaaaaacttgaaagtattacgaatagttttaaaggtgttgatcatagttttgcgattcaagcgggtcgtgaagttcgggtgattgttaaaccagaacaagtcacagatgaccaagcaaccgtcttagcacgtgatgtgaagaatcaaattgagaaccaactcgagtatcctggccacattaaggtgactgtgattcgcgaaacaagaacggtcgaatacgcgaagtaatgcggattggcctaacattgaagcgggggacaaaaccaattttgttccccgctctttttttggttttaattaaaattgtggaggacattatcatgaaagaaggtgtgttattagttaatttggggaccccagataaaccagaagtcaaagaaattcgccattttttaaaacatttcttagctgatcagcgggtcgttgcgatgcccaaagcggtttggctccccattaaaagtgtacatgcaacagcaagttgctcaattacaagctgaattacccgattatcaagtttttgaggcgatgtcatatagtcaaccattcttaaccgatgtgcttagtgagattcaaacggcgggaatcgatgatttgacggtcgtgccaatgtatccgcaatattcaacgactacgacgatgtcggtttatgatgtagttgcgcagttttatttaaaacaatcaaacatgccaactttgcattttgtgaaggacttttatcaacgctcaggctatatcgacttgatggcaacggcgattgaacagaagctacagacgcaaacctatgacgaaattattttgtcataccatgggattccaaagtcgtacgtaacaaaaggggatccgtaccaagcacagtgtgaagcaactactgcgctattgcaggcgcgcttgcctaaacaaacttttcggaccacataccaatctaagtttggaccgaatgaatggctaacaccggccactagcactacgatgcagtcattagcccaagaaggcgttagaaaaattttggtcctaaccccgggctttgttgcggattgtttggaaactatcgaagagattgatgttgaaaatcgggactattttatggataatcaaggcgaacaatttgattacattcatccctttaatgctgatccacgatttacggccttattagcccagattgtgcgggacagataatcagggtgcttggcttttgcttaagaaatcaagtcattgttgtgtttaacgggtttgatttgtataataaagagaatgcaagagaaagtaggcaagttgaatgcaacccatgtttaaaattatagttggtctatttgcgacgatgctcgtatcggccgcaattaccccattagtgcgccgcctcgcgtttgttttaggcgcagttgataaaccaaatgcccgccgagtgaataaaaaggcgatgccggcaatgggtggtctggccatttttatcgcgtttacgtttgggaccttcgtattattacgcgggcaattccaaacacacgaacttttcagtatcttcttagcagaatgtatcatcatcatcactgggatgatcgatgatattaaggaattgaatccaaaggaaaagatgctcggtattttattagcagcattggtcatttatttcttagcgggcgtccgcatgaatattttgacaattccatttttaggcacctttgaactaggatggttaagcttcccaatcaccattttttggattctggcaattaccaacgccgttaatctgattgatgggttggatggcttagcaactggcgtttcgattatcgcactcttcacaatgggcgtcatcgcctatttcttcttatcaatcaccaatgtcagcgtctcaatcatgattttttgtttggtcgctgcattaatcggtttcttaccacataacttccatccagcgaagattttcttgggggataccggggccttattcattggttttatgattgcggtcttatcgctcaaaggtttaaaaaacgtgacgttcattacgttattgattccagttattattctcggtgtaccaattacggatacaatttacgcaatgttgcgccgaattttgaataaaaagcccatttcacaagcagataaacatcatttacaccatcgtttgatgcaacttggtttatcacatcgccaaacggttctcgtgatttatggactggcattggtcttctcgttgatttcattgctctatccactatcgacactctggggaagcttggcattgacggtagccgtcttaattggcttagaattatttgttgaatcaattgggttacttggtgacaatcgccgcccattattgatgcttttaaaacgattattaaaaccgaagaatgaagaaaaggattagccattggctaatccttttcttgcgttattggtagcgaatctggtgtaaatcctgtgcgctaatggggacttcgttgaattgttgagggccaaggtcgaattgtaattggccgttgaggcgttcggttaattgttgttgtaaatcactaactgctgtagtcgctaaccagacggtcatttgaatgttagtcgtatattggatgtcttcggcagtgaggtttaattggctaagtaaattttgcacagtgtcaaattgagcgtagtcaattgtaatctgacaagcggtttgttcgataccttggacaataccgaggtgttcaagtccggccgaagtggcgtgactgtatgctcgaataagaccaccagtaccaagtttgatgccaccaaaatagcgggtgacaacgacacacagattagtgagctgcatctggcgcagtacttctaacattggcacgccggctgtgccacttggctcgccatcgtcactttgtttttgaatattggccgttaaacctaattggtaggcgaaacaattatgattggccttcagatttgctttgcgaacttgtgcgatgaacgcttgtgctgcggtttcgtctgtaacacgcgcaacatgacagatgaagcgtgactttttgatttcgagttcaaattcgccgtctttttgaacggtaaaataactttgcataccggactccttgaaaaaataagctggatttaacggaactaagggtggaaggtgaaatgatggcaaaacaacttgcttatggtcgtcagtggagtgccacccaattgagtaccgttatgaataattatagtttaccacagattaaacagcgactagcgtttcaaatagttaatcagcgtctggtatgtcaacggtgtggacaagtggtgaaagagcaagctcgcttacctgatggtcggtattattgtgctgcttgcttgacctttgggcggttagtggaaggggatcagttggtttacgtgcctgaatgcaatctgtttgagtcgatcgtagaaccgctaacttggtcggggacactaaccccttttcaagcacaagccgcaaagcagattgttgcggtcattaccaagcaacaacgccatgtcttaactgcagtgaccggtgctggtaaaactgagatgttatttcaaggcattgcgacggctttagctaatgggcagcgtgtgtgtgttgctgcgccgcgggtggcggtttgtttagaactctatccgcgcttgcaagcagcgtttgctaacacaccaatcatgctgatgcatggggaacagactgcgccttaccggtatacgccgttagttgtttgtacaacccatcagttatttaagttttatcaggcatttgacactgtcattgtcgatgaggttgatgcgttcccatttgtcaataatccccagcttgagatggctgttaaacaggcgtgtaagccatgctgtgcattgatctatctgacggcgacaccaactgtaaagttgcgccatgcgattaatacaggggatttaacgggtagtgagctaccaattcgctttcatggtcacttattacctgaaccgcattgctatcccttgtttacgtggcggcgttcagttaaacggcatcagttaccatccgtgatgcgcaacttactcaggaagtgtcttcaagaacaacgcttattattatttgtgccacaggtaagggatttagaggcggttcagcagagcgttgttcgggcattgccacacattacagtgaacacggtacatgctggcgatcctaatcaattagacaagatagcggcctttagagcaggatgcggggacgtgctgattacgacgacagttctagaacgaggcgtaacgtttaaaaatattgcagtgtttgttcttggtgcagaacacgtggtcttcactgaatcagtgcttgtacagattgctggccgagccggacgacagcaagagcatgctgccaatccggtttattttttctacgcggattacacggtcgctattcagcgtgcgtgtcaacaaattaaacgacaaaatcgaaaaggacggcgattacaatccactgtttaatgtgtgcggcagttatccttgaacaaccctccattgcattgatttgttcattgcgaccagtctatccggcgatgatctgttcacgttgcatggcacagtttgaacggattgggccgcagtgttgttcgggatgtggtcggcaaatgacaacccagggggtgtgtccggattgccagagatggcagcaactgtatccaggcgaacaatttactaatcgagcgttgttaacatacaacgaaccaatgcaacagtattttcaacgctataaggggcagggggattatcgattacgtcacgtatttcaacggctgattcgagaaaattttcctgtgcaacggcaaacggcgtatatcccagtcccgactgatccaacacatttgcaaagccgcggattcaatccggtggttggcttatacgaggactgttttccactgaccccattgttgcagaagctaccaactgaaaaaggacaagcacaaaaaaatcgtgcagagcgcttagcaacgccgcaattttttaaatgcgcgcagaacgtgctgttgggttccaaggtgcagcagttaattttgttggatgatatttataccactgggcgcacgttatggcatgctcagcagtgtctccgcaagcgataccaaacgctgccaattcacgcaattactttagtccactaggaccatattatttgtgtgttacgcgcaaattatatataatgaagtcagtaacaaagcctcgggaaagaattgagttccgagcgacaagtgcccacagggggtatttgtgaaaggggagaattcatatgctaagttttaatgttcgtggtgaaaatattgaggtaactgacgcaattcggagttatgttgaaaagaaaatcagcaaactcgaaaaatatttcgatgattcagcgaccgcaactgcacacgttaatttaaaagtgtactccgataaaaccgctaaggtggaagtcaccattccattaccataccttgtattaagagcagaagaaacatcgcctgatatgtatggtagcgtcgacctagttactgataaattagaaagacaaattcgtaaatttaaaacaaagattaaccgtaaatcacgtgaacgcgggattaagggtatggaattaacggtgccagaagcagaagcattaccagaagaatcaatgcaagtcgttcgaacaaaacgcgtttcattgaaaccaatggatagtgaagaagcaatcttacaaatgaatatgctaggccatgagttcttcatcttcgaagattcagaaacaaacggtacaagcattgtttataaacgtcaagatggtcgttacggtttgattgaaactgatgaataagtgaacgttaagttagggctgggacaacgatgagttgcgctcagcccttttttgtagccatatagataatggggttaaatttttactgaattggctggattgtttactgtgacagggttttatttgattgtaataaatggtaaaatgaattgttagtaatcatattgactatataagaaatcgctatttaagaactcaaacgtatttctagaggagaattgacgcacatggcaaactttctaaaaacatgggtagaaagcgataaacgtgaagtagcgcgaatgggcaaaattgccgatcaagttcaaagctatgaagatgaatatagtaatttatctgatgaagcgttgcaagctaagaccccagaattcaaaacaagattagcaaatggtgaaacattagacgatattttaccagaagcttttgcggttgcgcgtgaaggtgctaaacgtgttttagggttattcccgttccgagtacaaattattggtgggattacgctacacgaaggtaacatcgctgaaatgaaaactggtgaagggaaaaccttaacggctaccatgcctgtttatttaaatgcattggctggtaaaggcgttcacgttgttaccgtcaacgaatacctttcaagtcgtgatgcaacggaaatgggtgaattatataactggctcggtctttctgttgggttaaacttaaatgctaagacaccagaagaaaaacgcgacgcatacaactcagatatcacttattcaacgaatagtgaacttgggtttgattacttgcgcgataacatggtggtttacaaagaagaaatggttcaacgaccattgaactttgccattgtcgatgaagtggattcaattttaattgatgaagcgcggacaccattgattatttctggtcaagctgaaaagtcaacagcactttatatccgtgctgatcgttttgttaaaactctaaaagaagaaactgactataagattgattggccaacaaagaccatcagtctaacagaatcagggattgaaaaagctgaggctaacttcggcttggacaatttatatgacactgaaaatacagccttgacgcatcatttggacgaatcattacgggccaactatatcatgttaaaagacattgattatgtggttcaagaaggcgaagtcctaattgttgaccaatttacaggtcgtgtgatggatggtcgtcgttattcagatggattacatcaagcgattgaagccaaagaaggcgttgaaatccaagatgaaaccaaaacaatggcgaatatcacataccaaaattattttagaatgtacaacaagttatcagggatgactgggacggcgaagaccgaagaagaagaattccgcgaaatttacaacatggaagttatctcaattccaactaaccgcccaattgcccgaatcgataaaccagatgtgctttatccaactttggaaagtaaatttaaggcggttattgaagatatcaaggaacgttatactaagggccaaccagtattggttgggaccgttgcggttgaatcttcagaattactatcgcgattactagatgaaaataacgtgccacacgctgttttgaatgctaagaatcactttaaagaagctgaaattatcatgaatgctggtcaacgtggtgcggtcactatcgctactaatatggctggtcgtgggactgatattaaattaggacctggtgtgacggatttaggcggtttggctgttattgggactgaacgtcatgaatcacgccggattgataaccaacttcgaggccgtgctggtcgtcaaggagatcctggtgtcacacaattctacatgtcattggaagatgacttgatgaaacgtttcggttcagaacggattaaagccttcctagaccgaatgaagatttcagatgacgatgcggtgatccaaagtaagatgattacgcgtcaagttgaagccgcacaaaaacgggttgaagggaataactacgatacacgtaaacaaacccttcaatacgatgatgtgatgcgtgaacaacgtgaagtcatctataaacaacggatgcaggtcatcatggcagaagataatttgaaagaagttatcatgccaatgatttcaagaaccgttaaacggattgtgcaattgcatacacaaggtgaaatggggagctgggaattagaagcaatccacgcatttgccacagcttcaatggtcagtgaagaagaattaccaattgaaaaattacaaggtaagactgctgaagaaatcgaatcattattgatgacctttgcagaaaagaattacgcaacaaaacaaaaacaattagcagatgcagatcaaatgctcgaattcgaaaaagtcgttatcctccgtgtggtagatgaacgctggaccgatcatatcgatgcaatggatcaattacgcaactcaatcggattacggggctacggtcaaatgaatccattggttgaatatcaagaagaaggttaccggatgtttgaagaaatgatcagcgacatcgattacgatacaacccggctcttcatgaaggcggaaatccgtcaaaatattcgacgctaacgcgtagaaaatggctgaggtagttaacttagccattttttaatgggaaaaaatagtggagggactaaaatatggaattaagtgaagcaaaacatcttttagaagcaattgaagctaaaataacgcaatttagggggtcactttgacttagatggcctgcaagaaagcatcgcgcaaaatgaagcgcaaatggcggatcccgatttctggtcggatcaaaaagcagcccaacagttaattgatcaaaataacgccataaaggaaaaatacgactcttttatgcaacttcaagcgcaatcagaagagctacaagtgacattagagctattacaagaagaacccgatgctgaactccagacgagttttgaagctgatttgacggctgttcaagctcagatgcaacaatatgaactcggacaattactatcgggcgactacgatagcaataacgcgattgttgaattgcatcctggtgctggtggtacggaatctcaggattggggttcaatgcttttgcggatgtacttacgctgggcagatgcacacggctttaccgttgaaacagaagattaccaggccggtgaagaagctgggattaagagtgtgaccttgatgattaaagggcacaacgcgtatggcatgttacgttctgaaaaaggggtccatcggcttgtacgaatttcaccgtttgattcagctgggcgccgccacacctcgttttgttcagtcgatgtgatgccggaattggatgattcgattgatatcgaagtccgcaccgaagacttacgaattgacgtcttccgttcaagcggggctggtgggcaacatatcaataaaacatcatcagccgtgcggttaacgcatttaccaactgggattgttgtttcatcacaggcgcaacggtcgcaattgcaaaaccgcgaaactgcgatgaatatgttgaaggctaaattgtatcaaaaagaacaagaagaacaggcgaaaaaagcggctgctattaagggcgaacagcttgaaattggctggggctcacagattcgctcatacgtattccatccgtacacgatggttaaagaccaccggaccgactacgaaaccggaaacgggcaagcagtcatggatggcgatttggatccatttatgtatgcctatctgcaatggcagttgagtcagaagaatcccgactagctgcaaagaaattgaaatataaatgtaatcaaattgtgattatttgaataaatagcatgctataatataaaagattgcggttttcattgacaataaataatgataacgacaaaaaaaggagtgtccccaattgattcgaatgacaaatgtgtcaaaaaagtatccaaatggcgtgacagcaattaaggatctttcgctaacgattgaaccctgcgaatttgcttatattgttggtcccagtggtgctggtaaatcaacattcattaagatgttgtaccatcaattaaaagcaacgagtggtgaaatcgaagtcgctggttttgatttaatcggtatgaaggatcacgatgtcccatacttacgccgtaagatgggtgttgttttccaagatttcaagttattaccacgtttaacggtgtttgaaaacgtggcatacgccatggaagtgatcgaggcagaacctcaagcaatcaaagatcgtgtattagaagtgctcgaactagttggcttgaagggtgaaattcgtcgctttccaaatgaactttctggtggggaacaacaacgggtcgcggttgcacgtgcgattgtgaaccggccagatgtgttgattgccgatgaaccaacggggaatctagatcctgaaacgtcagatggtattatggatattttagaagcaattaatgaacgtgggacgattgtcttaatggcaacccataacaaacaaatggtgaacgaacggacccatcgtgtcttagcgattgaagacggtcgcttagttcgtgatgaaaaagaaggtgactacggctatgaagattagaacattgaagcgtcatctcaacgatagttttaagagtttaaaacgaaatggctggatgtcaatcgcagctgttagtgcagttaccgtaacgttgttattagtcgggattttctttgcgatgatcttcaactttaacaagatttcacaagatattgaaaatgatgtgcacgtgcgggttatgattgaacggggcacaacaagtaaacaaaaagatcagctacaaaagaaacttgaaaaaatggcgtctgttaaagaagtgacgtattcaagtcgtaaaaaggaattaaacaaggttgtcggcagttacggtcaatcatttaagatgtttaccggagacgataatccgttgtacgatgtttacacagtaagtacgacaaaaccaagtcaaacgattaaagtcgctaaacaagcgaaaaaattgaaatacgtttatgatgccacttatggtgggaacaacgctaagaagttgttcaaggtaatgagtagcgtccgtaaatggggcgttggttttactttattattgctctttgtggcagtgttcttgatttccaatacaattcggattacgattttatcgcggcgcgacgaaatcggaattatgcgtttagttggggcaactaacgcgtatattcgctggccattcctttttgaaggggcttgggttggattacttggggtaattattcccattattgtaatcgacttaggttatggttgggtttaccgtcatatggcactcagcatggcttcagccggttattcaatgttgaaaccaggaattttcttattccaacttgatttaacaatggctgtgattgggattgtgattggggcattaggttctgtcatctcaatgcgtcgtttccttaaaatttaaactaaattagtgaaagagtggcgaacattaaattgttcgtcactctttttttttgaaccctaggcagttaagggggcaaaatgctatactgattgggataactgcgaaattcggcagctggaaatcgagcgtgtgtcgttggaaacacgcacggtatttaaatatagacgctgggggtttgttgaattgacgatgatcattgatattttgcgaccattactaacggtaccacttttatggttagcgattgtgtatgctggctggttagcgcatagacgaattagcttggaacggaagacctttagaattgcgattaatccacgatggatagaagtgggccattttgtgggccatgggctactcgcagggctagccttaagttgctgtaccttagtgttaggggcgatggttaatatgcaatggtggctggtctatcaactaatcgctattttgagtttgctagtggctgctagatggcaaaacgtatcggcaacctttttaatcagtgctttggtctacgctggtgcaacattcatatggccccaatatcagatggaaggtcaagcaagtcttttggctgaattattggtgattattgggttagtgaccgtcatcaatagtgttttacaacgttgggatgccgaggcaactgtgacaccgcgtgtgatgactagcaagcgagggcggttgacggccttctttatgagtcgacaaatttatattgcgccggtctttttcttagtgccaggggcaattgatatgccaagtttgggtttttggccggtcttaaatatcgggcatcaatcatatagcttggtaatcttgccattgttattgggatttagtttgaaagcagtcaaaggcttaatgaaatcagttgttactaaaaatgccaatagctatttgatctttggcttgttgttagttgggtttgggttaattgccgttgcatttccgaactggattattggcatgttaacagttgcgctagtactaagctgtgcattacaatggcggttgagtagacgcagtgcccatgaacggcagttgcactttacgaaaccctacgatggcgtctttatcttagggattttacgcgaaacgccggctgctaaaatggggttggtcgttggcgatacaattgttgaatgtaatggcgaggctgtctcaaataacgataatttttatcgggcgattcaaagtcagccaacgtattgccatttaaaggttcaagatttaaacggtgagttccggatggctgaaggcgcaatttttgctgatgcaccacatgagttaggcgttgtattattcccagagaattaagtaaataaagggtggcatgaatgaagacaattttagtggtagacgatgaaccagcaatcttgacattattacgctataacctggaacaagaacattttaaagtgatgacggcaactgacggtgcacaagcgctgacgatggctttacagcagtcgtttgattttattattttagatttaatgttgcctaagctagacggaattaccgttaccaagaagattcgggaggcaaagttaaaaacgccgattatgattctaacggctaaggatagcgaaaccgataaaattgtcggcctcgaagtggggggagacgactatgtcactaaaccatttagtccacgcgaaattatcgcgcggattcgggcaattgaacggcggacggcacagcctgtagcagtcgttgaaacgcaccctagtgatattttacaagtaggggacttaatggtcgatgaaggcgaagttgtggctaaaaagggcactcagaagctccatttaacgcctaaggagttcgaactccttgtttactttatgcatcggattaacaaggttcaaagccgtgagaaactcttaaatgcggtgtggggctttgattatccagccgaaacgcgaatggttgatattcaagtcagtcatttacgggaaaaaatcgaaacagatccgcgtcatccagtttacttaaaaacggtgcgtggtttcggttatcaattggaggaccccaaccatgaccaaacatgatcaatttagattttatcagctagccactattttagtggctgtttacataggttttattgtgcttgtcaatttggtgattgcccaacaacaagacgcgatgttaaaggaacggggcgccgactatgcgctaatcatcaaacaaccacagtttgatcggcaaaagtggttacgccaaaacggcttacaagttttgacgccaaaatcgccgaataaaacaaagttgcaaaaagcagtgacggatattgtcaatcggaatcattctgccgccaattttagtacgcggcaaacagttaataagcaaccgtatttgttttacgcacaccaagcagatcggcccaactttgtcttagtagtgcctcagcaacagttctggcatacgtggccgaagattgctttatcggtcacgattgtctatttaatcggtagctggatttttctataccgtttctggcggcaacgccgtcatttctttgaccacttgaaaattttagtcgctaatattcatcatattcggcatgaagaagtgcccgaaccgattatttttcaaaaagatgcgtcattatatatcctcgcgcaagaaattaataaattaaatggtgatatgcggcatatgcggcagaagattgccatgcaacagggcagttttgaccgcctaattgaccatttaccggtcggcgtcatggtgattaacgaaaatcgtgaagtcgttttgcacaatgaagcaatggatcggttattggagacgacgattgttactgagaaacacccctatattgatgatatcaagacgtatgaattaacacggatgattgagcacacttttaggtaccgaaagagtcatcaccaagaaattcagttgattcaaaatcaagaacggtttgtggatgcgaatgttgtccaactcaatacggttaaatcgaaattccaagcattagtcattttatatgatttaaccgatgtccggcgcgttgagcagatgcagttggattttgtcagcaatgtgagtcatgaattgaagacgccggtgacggctattacaggctttgctgagacgttgttagctggtgcggcggaagatcctgccacgcaaaagcaattcttacaaatcatctatgacgaaagtacgcgattaactgcgctgattcaagatattttagcgctttcgcatctagatcgtaaggaccaatcgcaagagcaacttgtgaatgtacgtgaattggtgcaggctaatctcgaactgatgcaacaaaaggcacaacaaaagcagttacacgtctccgttgatattccaacggatttagcgattagaattcagaaaatgaagtttaatcaaatcttgaaaaacctaatcgctaacgccatcacgtataataaacaaaacggctcgttggtgattgccgtgcaacttgaaaaagatcaaattgttatccgcgttgtcgataccggtttgggcattccaagtgacctacaagaaagaatttttgaacgattctatcgggttgatcaagcgcgcgcgacccataagagcgggaccggccttggactagcaattgctagcgagattaccgccagtttagaggggcagttgaccgtaaagagtcaattaggtgtcggtagtgaattcattttgaagctaccaaacgcttgatttacacaaaatttacatttgataggcttagtttttacaaaccttttttataatggaacttacgaggtttaaatggaattcgtggaggattaacatgcgcaaacgtaatgttattggcttattagtcacattcagtttattactattggctggttgccagtctaaacaaaatggtcagtccgtaacggcggtcggctcatcagcccttcagccgctgattgaagcgttagctgaacaatacagtgctgatcacagcggtcagttcattaacgtccaggggggcggttctgggactggcttgagtcagattcaatctggcgctgtacagatggggaattctgatttatttgctgaagaaaaggctggcattaaagcggacaagctggtcgatcatcgcgtggctgttgtcggcattaccccagtcattaataagcaattagggattaaaaacttaacattgacgcaactcgcgaagatttttagtggcgaaattgataactggcaagacgttggtggaccagatcagccggttgttttagtaaaccgagcccaaggtagtgggacgcggacgacgtttgaacaatgggtgatgaagtcgcgcaagactaaacccgctcaagaacaagattcaacggggatggtgcgatcaattgtagcgaacacgccaggggccatcagttatcttgctttttcatacgtagatgattcgattgcaatggttaaattaaacggcattgcaccaaccgatgaaaacgtgatgactaatgcatggccaatctggtcatatgaacatgtttacaccaaggggcaaccaactgggttaacaaaacgtttcttggcgtatgtcttatcagatgaggttcaacataaacaagtcggcaagatgggctatattccagttgctaagatgacggttgaacggtcggttgatggcacaattacaaaggttaagtagggggccaattatggatccaattaaagcaagtttacttaagaaatcacgcgcagccaaaagtgaaacacggggcaaattaatcagtttattctgtattagtttaatcgtgttcatcgtgctcgccattttctacttcgtcgcttcaaaagggttagcgaccttctttaaagataaaatcaatctaggccgctttttaacgcagtctaattggaatccaagtttgaaagatagtcatggtcgaccagaagtgggcgccttaccaatgattatggggtcatttggagtgactttcttagcggctttattagcaacaccgtttgcaattggcgctgggatttttatgactgaaatctcacctaagcggggtgaaaaattattgcaaccagtgatggaattgctcgttgggattccatcagttgtttacgggtttatcggattatccgtgattgtaccagctgtccgtcatttgtttggtggcagtggctttgggattcttgccgggacttgtgttttgttcgtcatgattctaccaactgtgacatcgatgacagtcgatgcactcaagagtgtgccacggcattatcgcgaagcctcactcgccttaggtgcaacgcgttggcaaacaacatggaaagtcgttttaaaagcagccacaccagggattttaaccggggttgttttcgggatggcccgggcgtttggtgaagcattggccgtccaaatggtcatcgggaacgctgcgttattaccacataacttaattaccccagcctcaacgttaacgagtgtgttaacgatgggcattgggaatacggtcatgggttcattagccaataatgcactttggtcattggcgttactcttattattgatgtcactactatttaacttattagttcgtttaattggtcggaagggagcaataggtcgctaatggatgcaaaaaaatgggataaagttgccaccggtgtgctaaccctcatcgctggtttgatcgtattattattagcaagtttgctcggctatatcttggtgcgcggattaccacacgtgacgtggcagtttttaacgaaacctgcgcaaacctttactaaaggtggcgggattggcgtccaactgtttaattcattctatctattaattttggcgatggtgatttcagtaccgttatcaattggtgccggcatctatctcgcagaatatgcgccgaagaactgggtgacgaatgttgttcggaccgcgattgaagtgttaagttccttaccatccgtcgtggtcgggttattcggtttcttggtctttgttatccagtttaagctaggcttttcaatcttagcgggtgctttagccttgaccgttttcaatttaccgttgttaacgcggaatgtggaagatgctttaaaatcaattcacttcacacaacgtgaagcaggtcttgcacttggtttatcgcgttatgaaacggttaagcatgtcgtgattccagaagcgttacccaacattattaccgggatgattttaggcgccggccgggtctttggtgaagcggctgccttgatttatacagctggacaaagtgccccatcacttgattttaccaactggaacccaatgtacatcgcgagtccgttgaatccattgcgacctgcggaaacattagcggtgcacatttggaagattaactcggaagggattatgccggatgcgactgcggtttctgctggcgcatctgccgtcttaatcatcgccgttttactatttaactggttagcacgggtcatcggcaagcgtgtctaccgtaaaatgacagcagcataggagaaaataatggcagattacgatttaacaaaaacgcacatcaaacatttagatgaaccaaaacatgaaattgccttatcaactgaagatttaaacgtctattacggcgacaaacgcgcgatgcacgatgcatcattgcaatttgaacgctatcgaattaccgcgttaatcggcgcttctggttcaggaaagtcaacctatcttcggagtttaaaccggatgaatgacaatattgctaatacacgtgtgaccggtaagattatgtaccggggcttgaacatcaatagcgatgacgttgatgtgtataagatgcgggaacatatcggcatggtgttccaacggcctaatccatttgccaaatcaatctatgacaacatcacttttgccttgaaacaacatggacaaaaagacaaaaagtatctggatgaagtggttgaaacgtcactaaaacaagctgctttgtgggatcaagtcaaagattcattaggaaagagcgcattggcactatctggtgggcaacaacaacggttatgtattgcccgggcaattgcgatgaaacccgatattttattattggacgaaccggcttcagctcttgatccaatttcaacgaacacggttgaagaaacattgattcgcttaaaagaagaatttacaatcatcattgtgacgcataacatgcaacaagcagcacgaatcagtgattacacggcctttttccattcagggcacgcacttgaattcgacgaaacacgtaaaatgtttacccggccgaagattaaagcggccgaagattatgtttctggtcactttggctaggacgcaaggaggtttgccccgtggcaaataagattattgaatcctcagatgtgcatctattctatggtaagaatgaggccttaaaagggattaatatggattttgttgaaaatgaaattacggcgctcatcgggccatctggttgtgggaaatcaacctacttgcgctgcttgaatcgaatgaatgatttaatcgactcggcgaaggtgaccggtaaattcttattgaatggccaagatatttatgcgcctgagatggataccgttaagttacggaaagaagttggcatggtgttccaacaaccgaacccattcccattttcaatctatgacaatgttgtttacggcttacgtttatccggtgttaaagatcatcgcgtcttagatgaagccgttgaaagtagtttgaaacaagcggccgtttgggacgacgtcaaagataagttacacgaaagtgctttatcactttctggtggtcaacaacagcgggtttgtatcgctcgggtgttagctgtgaaaccgaaagtgatcttaatggatgaaccgacttctgcgctagaccctatttcgagtgctaaaattgaaaatatgttgctagaattgcgccaacagtataccattataatggtgacgcataatatgcatcaggcttctcgtatttcggataagacagcattctttttacaaggtgaattgattgaatacgcaccaacgaagaagattttcttaaacccaaccgaaaaagaaacggaagattacatcagtggccgttttggctaagaaagaagggaaaccacaatgagacgactttttgaagatgagttaaatgatttacacgttcgcttctccgaaatggggatgatggtcaacgaagccatctataaatctgttaaagccttcattaatcacgataagcaactcgcacgcgaggtgattgctgacgatcataagattaatgaacgggaaacggatttggaacgtaagagttttgagttaatcgcacttcaacaaccggtctcaactgaccttcgcgtgattgtcacaatcatgaaggctagttcagatttagaacggatgggtgaccacgccgtttcaatcgcgaaatcaacgattcgggtcaagggtaatacccgtgtccctgatatcgaaaaagatattgcggatatggcagacaaagttaaacaaatggttgaagaggtattggacgcttacgtcaaagaagatcgtaagaaggccatcaaaattgccgatgaagatgttgcaatcaatgcttattcagacaatatttatgacgactgtatcaaagaaatgcaacgtgattcagaaaccgtcgttgggagcatggactacatgttagttgcaagctacctcgaacggattggcgattacgtgacaaacatctgtgaatggattgtctacctcagaaccggtaaggtagtggaattaaactccaatgcacaagaagatgaattctaaacaattcaattaaaaattttaaaaagcgatgacaaggtcgacttgctcgtcgcttttttagtgggagaatcataatgcaaaaacaaatatacttagctggcggttggtttacacctaaacaggcctcattagtggaacgcgcacacgcggctttaaaacaaaacccaacgattggttatattcatagtccacaggaacatcaatacaagggtgtgacagaagatcatgatccagaaggcatgttcggggggtacgaatgggccaaccaaacgtatcaaaacgacatcacagcaatggatttagcagacatggcagttgtgttatgggatatgcaagacgaagatactggaacggcgtttgaagtcggctacttgaatgcctgtcataaaccaatcgtctttgtttgtgaagatgatttacaagccaatcccatcaacctaatgttggctaaagggattacccaatgtctaaccagtgtggatgaattagcaacctttgatttccaatttgtcgccggcgaaccttacccaggacaaatcgtttaagcaaaaaagcgcaggacaaaaataattttgtcctgcgctttttttgttctcactcttgatacctaaataaaaatcaacctttggacctatgacaatcgactgtaaaatcggcataatagagtcatagtcaagtgaaacagtacaacgaatgatcaatggaggtcaaaacaatgaatgaacgtcaacgaattttagacttagtgaaccaaggtattttaacttcagaagaagcattagtcttattagaaaatttagccaaaaatgaccaagatgtaaaatcaaatccaactgaaacagcaacggagcaaactgaacaaccaaccgctgataaaagcgcaattgaagaaaaggcacacgaattaaccgttaacctttccggcgttaaccggcagttgcaagatttgaagcaagcaatgcacgctgatcaagaacaagtcactgtccttgatacgatggaagatttagatagtttaagcagtgaaaaagcaaccgaacggcaaacactcaaggctggcttattacaaaagcaagctgaagtcgacgagttggaagccaaacgcgaagcattgacggatgaactcaaccaaatcgaaaaagaacgccgccaaatgaccaaaaatcaatggtcagaaaaattaggcttatcagatgactggaaagaaaatgccagtgaaacatttgatgaattgagcgataagttaggcgaagctagcacacactttggtaagttcgtgaagaatactgccaaaacagtcatggataatgtggattggaaagaagtgaactttaaggtgcctggtttggcaactgaaaagttcagccatgaattcgtttattctgacgtaacaccagaaatgattaacgtcaaagtggctaacggtagtgtacatttccaaatctgggatcgtccagaagtcaaagtcgcagcgcaagtgaagttatatggtaaaatggcagaagcaacaccattggctgcttttgaagcgcgcagtacaattgatgtgactgatgccgacttggtcttccaagtgccgaataaacggattcaagcggacttaacgttctacttaccagccaataactacttacaaacgaatgtgaagttattgaacggggatgttgaattagatggctttaccggccgggatatttacttgaagacgactaacggtgaattaacgttaatcagcaccaacgctgcaatggtggaagctgaaaacgtcaacggtggcattacctttgatcaaggtcgttacgatgatttactcgcaacaacggtcaacgggaacctattgattcaagcgcaagttttaaatgcgagtgtttcaacggtcaacggggatatcaagaacactttgacgacaactgatttacaacatctaaaagcaaaatctgtgaatggcacaatcaagacagctttaccacaaactttggcaatgactgttgatgcccgcacgcgttttgggatgattaaaaatcggcttgcaaacacccaaaccatcgaacaacggcaaagtacggggaatcaaatgttacaacttggccgtaacgacaatgaacaggcagctcgtttaacattaagcacgacaactggtaatattttattgaaagacaacgataactaaaaaattaaggaatggtgggttttaacaatggggaaaagactttataaatcaagagataacaaaatgatttctggtgtgatgggcgggattgctgagtattttaatattgatgcgacattagttcgaattctatatgttgtattctcaatgttttcagcagcgttccctgggattgtggtctacatcatcttagcgatggtgattccagaacggccacgtcagagtaaacatgattctgaaagtgaatggagtgagttttaatgccttttttaatgattttattagtcattatcgccattatggcggcagttggcgtgtttagtctcgtgattggctcgctactgttattattaaaatttgcgctaccactgattgtgattgggttaattgtcagcttcatctaccgggcaattgctggcccaagtagacgtccacggcatgcagactggcgccatgactaccaagactattcttatcaagaaacagcacatcaaggtagccgtcaacgcaaggaagctcgtgatgtcaaagtagacgatgatgactggagtgatttctaatgcggtattggacacgcgtaattgttgatactttgttattcattgcgatttctggcttattgcccaatttattctatgttgaaaacatttggatcgcgttagtcgccagcattgtgttatcgattttaaacatctttattaaaccattgttgagcttactctcatttccaattacgtttttaacgttcggcttgtttagtgtcgtgatcaacgggattatgttagaattgaccgctgttttcgtcggcgcccactttagcttcacaagttttggagcagccgtgatcgtggcaatcatcttatcaattgccaatacgattattacaaatcaatttgtgagagagcgttattaaaaagttagcgggactgacgtcaattaagattgacattggtcccgttttttttgtttagataagaaaacgcctacattaaagttgaaaaatcaccttaaaagcaatatgatagaggatataagtgaaaatgaaggacgggtaactcatggctgatagtgtttcaattcaaaaactaatcaccgatttaaaattacaagtttatgccggtgaagcacatttaaaaaataaagcagtgacggtgagtgatatttcccgtccaggactcgaattaacgggctactttaattactacccttacgagcgggtgcaattatttggacggacggaagtttcatttacgcaaaatatgacaccagaagaacggttaatgattatgcgtcggatggcttctgaagatacgccctgtttcttggtctcgcgccaattagaaccaccaatggaaatgcttaaagcagctgaagaagcgggaattcctgtgttggggtcgaatttatcgacaacgcgtttgtcgagtttagtaaccgattatttggaaggaaagctagctgaacggcgctcaatgcatggtgtgttagtcgatatttacggtttaggtgttttaattactggcgattcaggtgttgggaagagcgaaacggcattggaattagtcaaacgaggtcatcggttaattgctgatgatcgggtcgacgtttatcaacaagatgaacaaaccgtggtcggtgaagcacctgcaattttgcgtcacttacttgaaattcgaggcatcgggattatcgatgtgatgaacctctttggtgctggtgcggtgcgggctgaaacgtcaatttcgttaattgtccacttgcaaaattggtcacaggataagaaatatgatcgcttagggtcagataccgaagaacaaatgattttcgacgtccctgtaccgaagattaccgtgcctgttaaagtcgggcggaacttagccatcattattgaagtggcggcaatgaacttccgggcaaaatcaatgggctatgatgcaacgaagaccttcgaagccaatctaggcaagttaattgaagccaattcagatgaagaagaatagttaaaagtcagaaaagttcgttaaatatggtaggtctaatgactagtttgagctatactgttagaaagacagtatgcaaactagtctttttttagagtgcgcagtaagccgggtatatcctgaggattaacacagaatggcgaaggattgcgtcagcaatcgtttgacattcagggggaaccggaaggatatggcttacggaacacgttttggataagagtgcattcaagcttgtccaacttttgcgcattagcacagtgaagcgataagcgacgcagtcgattgtttgcttcacgacgctaagcgcagaaatttagcttgaaaagtacgttttgatgaaagcacatttacaaaaggagcgaataatttgaatctactattaggcgcattaaatccgattgcattacgattgggcgcattggagatccactggtatggtgtgattatcgcaactggggtcgttttagccgttggattggcattacaggaagctaaacggcgcaatgtcagtgaagatgatattttaaatttaattttatgggcattaccatttgccttaattggggcccgactgtattacgtcgtttttgaatggtcgtattaccaagccaatcccggcgaaattattcagatttggcacggcgggatcgcgatttacggtggactgattgcagctgccattgtgttcattatctattgtcggcgtcatgcactatcgccttggttagtgttggatattgcggcaccaaccgtgatgatcgcacaagcaattggacgttggggcaactttatgaaccaagaagcctatggggcgccaacaacattgcactttctccaatcgttacacttacctgattgggtgatccaacagatgttaattgatggtgcgtatcgtcagccgacattcttatatgaatcagcatggaatgtattagggtttattatcatcatgagcattcgccatcgaactggttggtttaaacaaggcgaaatcttatttagctatttaatttggtattcgtttggccggttcttcattgaaggcatgcggactgatagtttattcatcggtccattgcgggtatcgcagattgtctcactcgtcttattctttggtgcaattggtctttggatttggcggcgtaagcacagtcagttaccggattatttaaccggcaatcaagcaaaagaacagaaatagggatttgtttaaaaggagaattatcagatgacagtaaaaattgcagttttaggggccggttcatgggggaccatcttagcaaacttattagtggaaaatggccaccaagttgagttgtggggcaatgatcctaaaaaagtcgctgaaataaatgaacagcataccaatacacattatttaccagattttaaaattgatccccagttacacgcaacgattgatcttaacgttgcacttgaccaagttgacgttgtcttgtttgtaattccaacacaagcgattcgtgcggtggcggaacagattgttcctgtgatgattgcgaaaaaagtgaaacccgtgattgtgacggcttcaaaagggcttgaacaaggcacgcacaaacggatttcagaagtcttgacagaagccattccagaaaccaaccgcaatgggattgttgttttatcgggtcctagtcatgctgaagatgtcgcacaaaaagatattactaccttaactgccgcatcaagtgacttgattcaagcccaatggatccaagagattttcatgaatgattatttccgcttatataccaaccctgatgtggttggtgttgagatgggagctgctttgaaaaacgtcattgcacttggcgcgggcgctttaaacgggcttggttatggagataatacgaaggccgccttgatgacgcgtggcttagctgaaatttcccgcttaggcgttgccatgggggctaacccattaacctttatcggattatccggtgttggggatttaatcgtgactgggaccagtgttcactcgagaaactggcgtgcgggaaatgcacttggtaaaggtcaaaaattagctgatgtgctagccaatatggggatggtcgtcgaaggggtcgcaacatgtaaagcagcctatgaattggctcaacaacgttctgttgatatgccaatcacacgggccatctataatgtattgtatgaagattgtgatattaagactgaaattgcgtatttaatgcggcgttcaggtaaacctgaaatcgattttgatgaagtctaaaactttttaacgaataaagcggcatcattttgaatgggtatcgcacccatcatcagagtgtgttatgatgattagcgttgagaaaaaggctaaaggagaaccgattactttatgggcgatttggtatctgtaagaccaacttgtgagttttattttgacagagggatgcaggcgtttgaacgatttcagtacacgcgcgcattaacgtgtttacaacgggcaaagtcgctggctaagaccaaagatgattacatctttgtggtgtgccaattagcgatttgtttggaatcggttggcgactatcatggtgcggcgaccgttctggaagaaattccaaccgccaactatcagagtcatcctgagttacaatattttttagcaacggcgtatgcctttttaaatcagacgcaggctagctatgaattagcgactgcttatttacagagtgacgattcggatttcgatgccgaagccactgaattattacaagaattgaaaccaacaagtccatcaaactggtaaaacagtttggtagacttttttttacataacgggtaagatacattctatgaagaacgagcactttttaaaagtaaggggataatagacatggctaaaagttatgatgtaattgtgattggcgcaggacctggtgggatgaccgctgctttatacgcctcacgtgcgaatttatctgtattgatgttggaccgcggaatttacgggggccaaatgaataatacagcagaggtcgaaaattatcccggctttaaatcaatccttggtcctgaactaggcgaaaagatgtatgccagcgccactcaatttggtgctgaatacggctatggtacggtcaactcgattgaactgcaaggcgagatgaagattgtgcacactgacgaaggcgatttcgaagcgcgttcaatcatcattgcaacgggttcagaacacaagaagattgggatccccggtgaagatgaattcggcggtcgtggtgtctcatactgtgcggtctgtgatggtgccttctttaagaataaagaagtcgtggtcattggtgggggcgattcagcgattgaagaaggcctctacttgacgcaattagccagcaaggtgacagtcattcatcgtcgtgatgaactacgcgctcaaaagattttacaagatcgtgcatttgctaacgacaagatggacttcatctggaatgcacaagtgacaactattgaaggtgacgacaagaaggtaaccggtgtcacttacattgataaggtaactggtgaaaccaaagaagttgctgcaagtggggtcttcatctatgtagggattgaaccaatgactagtgcctttggtgatctagggattctaacggatgccggttggattaaaacggatgaccacatggcaaccagtgttccaggtatctacgcaattggtgacgttcgtgaaaaagatcttcgtcaaattacaacagcagttggcgacggcggcatagcaggccaagaagtatttaaatacttacaaagtatctagagtgcgacggcagccggttagcttccgaggattaacacagaatggcgaaggattgcggtagcaatcgtttgacattcagggttaaccagaaaagacagttcgaggaagcacgattagagtgcgttcgaaacgattttatttttgaggattaacctaaaaatgtggcttatgacgcacatttccagcggtcgactaaattttagtcggccgtttttttattttgggaaaaattttaatttttagaaggacaagcattattaaataatcgacccagacaattagcttggtgcgcattaccgtacaaccgatgctttaggaaagcggttgattatggtatacttagaactagcttttagactaaaatgcgggggttacacaatgagctggcaagataattatgcaatttggaataatcaaacagaaatggatttacctttaaaaaaagcacttaacgaaatggcaaacgaccatgatgcattagaaaaagcatttagcgttccaatggaatttgggacagctgggatgcgtggtattttaggccctgggatcaactgcatgaatatttatacggtgcgtcaagccacagaaggcctcgctcaattcatggaaacattaccagaagcgactaaaaaacgcggtgtggctatcagttttgattcacgttatcaatctgaaacatttgcgcacgaagcagcgcgggtcttaggtcaacatcaaatcccaacgtttgtttttgatgccttacgcccaacacctgaattatcatttaccgtacggcacttacatacctatgccggtatcatgattacagcaagtcataatcctaaacaatacaatggttacaagatttatggcgaagacggcgcgcaaatgccacctaaggaatccgatttaatcacaagttatattcgcaaagtaaccgatttatttgcgattgaagtggctgatgaaagcacattgcgcgaagccggcttaatgactttgattggcgaaaatgtggatcaagcttacttagctgaagttaagcaagtcacgattaatcaagaattggtcgacacagtcggcaagaccatgtcattgatttacaccccacttcatgggaccgggaaagtacttggtgaacgcgcattgcgtcaagcaggctttgaacaatttacaatggtcgctgaacaagcagttgctgatccagaatttgcaacgacaccattccctaatccagaattcccacaaacattcgatatggcgattgagctcgggaaagcacaacaagctgacttgttgattgcgactgatccagatgctgaccgtttgggcgccgctgtgcgtcaaccagacgggagttaccaattgatgactgggaaccaaatcgcttctgttttattacgttatattttacaagctagtaaagatgctggcacattaccagccaatgcagcggctgttaagtcaatcgtgtcaacagaattggcaacgaagattgcagcgagctacaatgtgaagatgattgatgtcttaaccggcttcaaatttatcgctgaacaaattcaacactttgaagacacagacgaaaacaccttcatgtttggtttcgaagaaagctatggctacttagtgaaaccattcgttcgcgataaagatgcgattcaaacattggtcttattagcggaagttgcagcttattacaagtcaaacggtaagactttgtatgatggcattcaagaattatatgcggaatacggctacttcgctgaacaaacgactgcagttgatttcgaaggggtcaatggcccacaacaaatggctgacttgatggttaaatgtcgtgaagaaagcccagttgaatttgccggcatcaaagtcgcttcagcagaagacttccaaacacaaacagaaacttttgcggacggtcatactgaacccatcaatttaccaacatctaatgttctgaaatatcacttagaagatggcacttggattgcgattcgcccaagtgggactgaaccaaaagtgaaattctatgtggggacatccgctgatgatgccgcaacagctgatttgaagttagcaaacttcgaaaaagcaattcatgaacttgtaaaatagatagggcttctgttttacatttcaggataacttacctataataaagaacagcaaatagacggactactgcgttagtcggtctatttttgtaagaaaagggaggtagtttggtatgggtatgcatcaatatttgcaaggtttgaataatttggagacactaaatcgcgcaccaggattgtttaaatatcaagaacattccgttgcagcgcactcctttaaagtagcagaaattgcgcaattattaggcgatattgaagaagaaaatgggcaaacgattaattggcaagtgctgtacgaacgcgcactgaaccacgattatacggaacggtttatcggtgatattaaaacgccggtcaaatacgcaacgcatgaattgcggacgatgttggccaatgtcgaaagttcattaaccgctaacttcattaaaaatgaaattccagatttcttacaagaacggtatcaacgtcgtttgagtgaaggaaaagatgaaactttggaagggcaattattagccgttgccgataagattgatttactctacgagtcttttggtgaaattgaaaaaggtaatcctgagaatgcttttctagaaatttttgcggaaagtttaaaaacgattatgcaataccaaaatctcgcatgcgcccgttatttcatccaagaaatcttgccagatttactgagtgaagacttcgcagatcgagggaagctaacccaattagtgagacagacgctagcggaatagagtgccgttgtcagtcgctcagattcagagcatttgcctaacttggcgaattgacgctataagcggcgatttgacaagtgtagcaaagcgcaggaatctactgacaacagcacgtttccacactttagttgaaacgtgctttcattaagcatccttttccggttagctacaccagccgcatcatcgactgcgtcgctaatccgtctggttaggctaatcctcaaaggataaccgcttaatgacgcactctttaatcagcactctggcgaaagtatgttcggtgtggtagaatagtgaatgacttaaaggacaaggaatattattctttataaaatcggtaagtagacgttatggtggagggcaacttctacccggcgtcttcttttatcgctagcaaatggtaatggaggcttttgatgattgaacgacagaatgataaccaatttgatttagtggcgccctatgaaccagctggggaccaaccagcggcaattgaaacgttaactaagaacttcgaggcgggtgcaaaagcacaagtcttgatgggggcgactgggaccgggaagacctttacgatgtcgaacgtcatcaagaatttaaacaaaccaacattgatcatttcgcataataagactttggcaggccagctctatgccgagtttaagcaatttttcccgaataacgcggtagaatattttgtcagttactacgattattaccaaccagaagcttatgtgccttcaagtgatacctacatcgaaaaagattcgagtattaacgacgaaatcgacaaactacggcattcagcaaccagtgcgctgttggaacgcaacgatgtgattgtggttgcgtcggtttcatgtattttcggcttaggtgatccgaatgaatatcaagatcacgtcctttcgttacggccagggatggagattgagcgcaatgacttattgcgtcaattggtggatattcaatttgaacggaacgacattgatttccaacggggccgtttccgcgtccgtggtgacgtggtcgagattttcccggcttcacgtgatgatcatgcgttgcgggttgaattcttcggcgatgagattgatcgaatcgttgaagttgacgcgctaaccggtgaagtcattggtgaacgcgaacatgttgcgattttcccagcaacgcatttcatgactagtgaagaaaagatggaaaaagccattaagagtatcaaggctgaattagaaggccgactaacggaattgaaggcggacggcaagttgttggaagcccaacgtttggaacaacgaacgaattacgatcttgagatgatgcaagaaatgggctattgctcggggatcgaaaactattcacggcacatggaggatcgtgcggcgggggaaccaccttatacgttgctcgatttcttcccgaaagattcaatcatgatgattgatgaatcccatgtaacgatgccgcaaattcgcgggatgtataacggggatcgtgcccggaagcaaatgttaatcgattatgggttccgattaccaagtgcgcttgataatcggcctttgacgctacctgaattcgaagaacacgtcaatgaaatcatgtacgtttctgcgactccaggcccttatgaagctgaacaaaccgatattcaggtcgatcagattattcgaccaactggcttgttagatccgaatattgaggtccggccgattatgggccagattgatgatttggtcggcgaaattaatgatcggattgaaaagaacgaacgcgtctttattacaacgttaaccaagaagatggcggaagatttaactgactatctcaaagaactggggattaaagtccgttacttgcatagtgatatcaagactttggaacgaacggaaattatccgtgatttacggcttggtaagtttgacgtcttaattgggattaacttgttgcgggaagggattgacgtccctgaagtctcgttagtggcgattttggatgccgataaagaaggtttcttgcggagcgagcgctcattgattcaaacaatcggccgtgcttctcggaatcaaaacgggcaagtccttttgtatgccgataagattaccgattcgatgcgcaatgcaatggatgaaaccaagcggcggcgttcgattcaagaagcctacaacgaagcacatcacatgacgccgaagacgattatcaaaccagttcgggatgcgatttcggttgttcaatcagtcgaacaccctgaagaagtcaagatgaccaacgagattgatttcgatagtatgtcgaaagctgaaaaactagaaatggtagaacggttatctgaacaaatgcggaatgcggccaagaaactggacttcgaacaggcagctacgttacgggataccatcttagagattaagagtgaaattgattaaaagaggtaaagcatggcaaatgataagatcgtcattcatggcgcaagagcgcataatttaaaagatattgatgttacaattccacgggataaactggtggttgtgacgggattgtcgggctctgggaagagttcgttagcgtttgatacattatatgccgaaggacaacggcgctacgtcgagagtttatcggcttatgcgcgccaattcttaggccagatggataaaccagatgttgattcaattgatgggctcagtcctgcgatttcgatcgaccaaaaaacaacgtctaaaaatccgcgttcgacagtcgggacagtcacggaaattaatgattatctccggcttttatgggcgcgggtcggtcatccaatctgtccgaacgatgggactgaaattagtagtcaatccgttgaacagatggttgatcgtgtcttagcgttacctgagaagacgaaactccaggtgatgtcaccgattattcgtggcaaaaaagggcaacataaaaaagtatttgaaaaaatccaacgagaaggctatgtccgtgttcaagtcgatagtgaagtcatggacgttagtgccgatatcgaattggataagaataaaaaacacgacattaatatcgtggtggatcgaatcgtcgtcaaagacggtgtccggtcccgtttatttgactcgttcgaagcggctctgcgcttatcagaagggtatgcgactgccgatatcatcggtggcgaacaactacttttctcagaacactatgcctgcccaatctgtggctttacggtgggcgcgttagaaccccgcttgttctcgttcaacgcaccgtttggggcctgcccagactgtgatggtttaggggttaagctagaagtcgatatggatttagtgattcctgataccagcaagacattgcgcgaaggagccattgcgccttggaatccaattagctctcaatattatccacagatgctcgaacaagcttgcaagtcatttaaaattgacatggatcgaccatttagcaaattaacaccacgccaaaaagacattatcttaaatggttctcagggtaagaacttccacttccattatgaaaatgatttcggtggtgtgcgtgatgtggacgtgccgtttgaaggtgtattagccaatattgaccgccgttatcgtgaaaccaatagtgatttcacacggacgcaaatgcggacgtatatgactgaattaacgtgtcaaacctgtcatggtgctcgtttaaatcgacaagctttggctgttaaagtgggcggccaagatatcgttgccgtttcagacaacgccatcaaagaagctttaccattcttcgatcaacttgaactttctgaaaaagacagtgtggttgccaaaccaatcttgaaagaagtgcatgatcggttaactttcttgattaacgtcggtctggattatttaacgctcagtcggtcagccgggaccctttctggtggggaagcccaacggattcgtttagccacgcaaattggttcgaacttatctggcgtgctctacatcctcgatgaaccgtcaattggtttgcatcaacgtgataatgaccgtttgatcgggtcactgaagaagatgcgcgacttaggcaatacattaattgttgttgaacatgatgaagatacaatgcgcgcggctgattacctgatcgatatcgggcccggcgctggtgaactcggtggtgaagtgatggccgctgggaccccaactgaagtcgaacataatccgaaatcattgacgggccgttatttagccggttccgaatatattccagtaccgctagaacggcgtcaaggcaatggcaagaagattcgcgtgaccggtgcggctgaaaataacttgaagaatctgacggttgatttcccattaggtgaatttgtcgcggttactggtgtttcaggttcaggcaagtcaaccttagtcaatacgattttgaaaaaagctttggcacaaaagatgaaccgtaactcagcaaaaccaggtcaatataaaacaattacaggttatcagaatcttgaaaaactgattaatattgatcaaagtccaattggtcggacaccgcggagtaatccagcaacgtacaccggcgtctttgacaatattcgtgatttgtttgcgcaaaccaatgaagccaaactacgcggttataaaaaaggccgttttagttttaacgttaaaggtggccgctgtgaagcctgcaagggtgacggcattatcaagattgaaatgaatttcttaccagacgtgtatgtgccgtgtgaagtctgtcatggcagtcgctataattcagaaaccttggaagtcgtctataagggcaagaacattgccgaaatcttagacatgacggtcggtgaagccacagtcttcttcgcaaacattcccaagattgcccgcaagttacaaacgattgtggatgtcggcttaggctacgtcacattgggccagtctgccacaaccttatcgggtggagaagcccaacggatgaagttggcctctgaattacagaaacaatcaacgggtaagaatttatacatcctcgatgaaccaacgactggcttgcataccgacgatatcaagcgcttgttgggcgttttggaacggttagttgaagaaggtaacacgatcttagtgattgaacataacttagatgttattaagactgccgatcacatcattgacttaggaccagaaggcggcgataaaggcgggacaattgtcgcgaccggtacgccagaagaaattgccaacgtcagtgaaagctatacaggccaatatttaaaacctgttttagaacgcgatacagcacgcacaattgccgctcaggattaaccagaagatggttgatagaatgtgtttaaaaagcgggcggttaagacagaatgattgctgttttaaccgcccactttttgttttgtcaaatttagttgtagattgtccgtaaaaaaagtatcataaaggtattaacaacgagaggtgattgggaatgtttagaaaaaatgaatggcactttgattggtcagaatttatgacggggattattttcttaatcgttgcatattgcttgtttaatcaaccaggtaagacattatctggtttggtaatcgtgattgcgattgcggcgattattcggggaattgccaaaatcagtgcatatagtcggttacgtcaagagacagggatgcgcgcaacgttaatgttggtcgatgccattgtcgatgtcattttgggaattttgtttatcttgaatattccagctggagtggctgctttaggttatatctttgcattctggttcttgttcgattcaattgtggcattattgaatgtcggccatctcaagcaatttaacacaggcctatacatcgtttcgatgattctgaatatcttaggcgtaatcgttgggatcttattgttaatggatccagtggtgactgccgtaacgatggtgaccctagttggtttttactttgctttctttgggattaatgccatcatcatcgcatttgcaagacgtttatagtctctaaatttaatgattgcggaacaatttgattgttctgcaattttttttatggaaaaaataagctctttcaaatgcctagacattaggaatgaactcggtttaatagcattaaataacacgtgtcgagagtttcgacagctttcaatgacacaccaggaatgttacaatgataaaagcgaaaacttaaggggtggtctgatgacagatacattgaacttagtagtgattacagggatgagtggtgccgggaaaaccgttgccatgcaaagttttgaagatctaggttatttttgtgtcgacaatatgccaccgacattgctacctaagttttgggaattggttaaggagtccggcaaagtgactaagattgcattagtgattgatttgcgctcacgtgctttttacgatgagatcattgaaatgcttgctaaccttgataatacccaattcgtgacgactaagattctcttcttggatgcatcagatgaggaattggtttcgcgatacaaggaaacacgccgttcccacccactagcgatggaggggcgtttaatggacggtattcaaaaagaacggcgcctgttaactgaaattcgcaatcgagcacagatggtggtggatacttcaaccatgtcaccacgacaattaagagaaaagatttttcatgtcttcaagacgtcagataatccgtcattccatattgaagtgatgtcatttgggtttaaatacggtttaccaattgatgcggatatcgtcatggatgtccgtttcttaccgaacccatactatgtgccagcatttaaggaattaaacggtttagaccaaccggttagagactatgtaatggcgcagccagcgactgaaaagttctacgaacaatttagtgggctgttaaaagacatcatgccaggttatctcaaggaaggcaaaacaagtgtgacaattgcgattggctgtaccggcgggcaacaccgttcagtagcgcttgcccaacgattggctgatgatttatcgttcgattatccggttgacgtgacccaccgggatatgaagaaacgcaaggaaacggttaaccggtcatgacagctactaatcggattatccgggtcattaaagggcgacgaccaaaagtcgttgtgattggtggcggcactggactacccgttatcttaaagagtctccgtgaacagaatgcggatgctacggcaattgtcacggttgccgatgatggcggttcatccggcgttattcgcgattacattaacgtggtaccacctggtgatattcggaatgtattagtcgccttgtcagatttaccacagttaacgctcgatatttttcaataccgctttaaatcacacgatgcctttttctcagggcatgcgattggtaatttaattattgcggcgttatctgaaatggaatcaggtatttttgatgctgttcaacggttatcagaaatgatggcggttgacggtcatatttatcctgcggccaatgttgcgctgtcgttgaatgctgaatttaaagacggcacccagttaacaggggaatctgagattactgcagcacgcaagcagattaagcgtgtttgggtctcaaaaacggatcaagatgatactgcagcacccgaagccgttcaacaagtggttgatgcgattttggctgccgatgtggttgtcttaggacccggcagtttgtttaccagtattttaccgaatctaatgattaaaaacttaggtgcggcagtcaagcaaactaaggcggaagtgatttacatttgtaatatcatgacgcaaaaaggggaaacggaacactttaccgatgccgatcacgtccgcgtgttgaatgatcatcttggtcagaacttcgtggacacggttttggttaataccgcacaagtccctgaaaactatttggatcatcaaaagtacgacgaaattctctggccggttgaacatgactttgatggcttacgaggattgggttgtcgagtgatttccgataactttttgaagttgaaagatcatggtgtgttccataatggacaaaaagtagcgagtgaaattatgaatcttgctttccaggtcaatacagctaagcgaggtgaataatcgtggcctcatatgcaagtgaagtgaagaaagaactgacgcaacttgaagtgcatcctgaacatgcacgagcggaattagccgctttaattcggatgaatgggtcactgagcttgatgaatcaccaatttgttttaaacgttcaaactgagaatccggcgattgctcgccggatttatagtttattgaaacaaaattatcaagttgaatccgaattactagtacgtcgcaaaatgaagttaaaaaagaataatcaatacatcgtgcgcttaaagtatgataccaataccgttttaaaagaccttgatattgttgaggaggacggttttaccattcatacaaaggtgtcagaagatgtcattaatgaagatcagcgcgtccgttcttatttgcggggcgcttttctagccggtggctcagtgaataatcctgaaacaagccggtaccatctggagatctattcattatacgaagagcataatcaagatattgcgcgcatgatgaatcgttttggcttaaatgccaaaacgactttccgacggagtgggtacatcacttatctgaaagaggctgaaaaaattgctgattttctacaagtgattggtgctaccaacgcgatgttgaagtttgaggacattcggattgtgcgggatatgcgtaattcggttaatcgcttagtcaattgtgaaaccgcaaatatgaataagacaattgatgctgctacaaaacaaatcgaaaatatcgaatacttgcgcgacaccgtcggattagataatttaccggcgaagttgcgtgagattgcgctactccgtttggaatttccagatattacgttgaaggaacttggggaaaaaatgccgagtggggcaatttcgaagtcggggattaatcatcggctcagaaaattgaatcaacttgccgaagcccaccaacaggggaatggataaggggcaaaataaatcggtagtgtacaatatttgacttgtacaatataattaagtacaataactgaaggacattttatggaggaaaattatatggttaaaccagtattattagatgaacaactctgtttttcgatttaccgcgcacaaaaggcttacaatcatttctacggtaaggtattaaaaccttacggattaacatatccacaattcatcgcaatgcttgcattgtgggaacatggcaagatgtcagtgaaagaattagggcaccatttagaacttgatagtgggacactaacaccgcttttgaaacgcttagaagctgatggttgggtaagccggaatcgtgcattagacgatgaacgccgagttgacgttaccttaactgaaaaagcagaaagtcaaaaagaagaaatctacgaacgggttggtgcttgcacaaactatctcgatttctcaagcgataagtatcatgaattacgtcaagaaatgaatgaagttgaacatcatttgaatgcgattcaaatggataatgcacgtttttcataaaatgacggataaagggttccaaaagatttgatggtaaattgaattttttggaaccctttatcgtacatacaaaaacaggtgccccgaggggggggcacctgttttttattttagtagttgacttaagtcagtcatatcaattgattcatcaaagatatggtcaccaataatgatggtcgggacgaatttaatattggcacgatcggcttcagcaataattgcggctaaattttctgcattatcttgtggcgttaatttgagattttgatcgatgtattttttaaattcatctggtgtcagatcattacgccatgttttttgatgcgtaaacaagaatgatagtgtttgcagcactatttcgggttgatcaaaaggtaaataggtatgggctaaattccccagttgtagatcctctttatccttatcaaaaggtttgataatacgttttagccgaccagctttgactgcttcagtcatcgtttcttcggattttaaaaaccacttgcggcaataaggacaagcggcgttgataaattcaattgatgttaatggtgcatctggctgaccaattgtaataccgccggtggttgtcacattctcgcttttaatcacactaatatccatggaagaccctcctttaagatactgccagtataacaaatttggtataaaaaaagggctagatcaacttgatctagccttttttttactaatccccagaagagaaccggtttattatctactctattttggttggttgaccataatatcgtcaatcaagccgtagtcttttgcttcttgggctgtcatgtagttatcacgatcagtgtcagcttgtaatttttcgaaggtttggcctgagttgtctgccaaaatttggtttaaacgtttccgagtcttcaaaatttcgcgtgctgcgatttcaatttcagtttgttggccttgtgcaccacctaaaggttggtgaatcaagacagttgagttaggcaatgcaaaacgtttgccttttgtcccagctgagagtaaaacactggccatagaagcagccatccccattgcgattgtttggacatcagacttgatgaagttcatcgtatccatgatggctaaccctgcggtcacagaaccaccaggtgagttaatgtagattgagatgtccttatctgaatcttgcgcgtccaagaataataattgcgcaatgattgtgttagccatttggtcgttcacttcaccagataacatgataatccggtcttttagtaaacgagagtaaatatcgtaagcacgttcgccacgagatgtttgttcgataactgtcggtactaacattgaattgcctccttatataagccagagtagaatcactctgtagtctataaattgaattttacagcaaaggtcaattttggtcaaatggaaagcctcttttcagaaagattatggtcattttgtgttcgaactgaaaatatggtatacttaggaaagttaatcagcacttatcactgtagtatcaagtattatttgaagactttaatcaactggagtaaccatggagttacaagtagtgtaaagaggcggcttacgctgtttaaacgagaagatatttagaaacacaagaatttagacataattgaattaacccaaaaataaaagcgacgtgaatcacacgtcatctccactagccattcgatgctagtgtgcgtagccaattagtgactggctacctgacattatgtaagaatttaatatgcgaaattaattagaaggccacctaggaataggtggcctttgtcaatggtttaaagattgagttgttcatgaggaggactcaatcttttttaggttatatttgtaagcgctattgtcaaaatgataatcgcgtgctattatacgaaattgaaccggttcaattctattcaataaagggagaaatgactgtgaaattcgtagataaactgtcagaaaagatgttgccgtttgtttctaaactcaataattagcggcatctaattgcaattcgggatagcttcattgtgacaatgccacttgttatggcggcctcgcttatggttttattaaatgcgctaattttctcaaacgccgctgttcaaaagattgttgatttaagtggattagctgacctagcaacaattgtgaataatgggacgatgagtattttatcaattgtggtctgttataacatcggtgctaatttagcaacgcattatgttcgctctgggaaagtgaacgatcctgcatttagtgcagttcatgctggtattttaagtttggcaacaatgtttattttgatgcctgtgacgagtaccgtcactttagcaaatgggaaaacggcggaagcaacaggcgttttcttgcaaagtttaacctcgtcatcaggacttgcaacagcgatgttagcagcattgattagtacggagttattcattcgttttacaaagtttgaaaaaatacgaatcaagatgccagaaggcgtgccaccagcagttgcaacctcgtttaattcattggtcccagaagtcttggttgttttgatttttgctatttttgtatttattttaaatgtgacaaccgggttgaacgtccctcaattaatcgaccttgcgattcaaacgccactaaaatcgtttgtattatctgtaccaggtacgttattcttacaattcttctcagatttcttatgagtctttgggatgcatggttctagcattttagcaccagttcgccaagcaccattgctacaagccattcaagaaaatatggcggctttttcagcaggacatgcgattccaaatattattacagaaccttttacaaatgcgttcggcttgattggtgggggcggctgtattttaccgttagtgattgctattttatgggcttcacggcggaaagatcaacggcaagttgctaaattagggttaacaacttgtttcttcaatattacagaacctgttatgttcgggttaccagttgttatgaacccaattttcatgattccatgtgccatcattccatcaatcaatttagtgattgcttattttgcaacaagcttaggtttgattagtaaaacggtagcggctgcaccatggattacaccgcctgttattcaatctttcttggcaactggcggtgattaccgagcagcgattttaaccatcttattaattggtttagatgtctttttattcttaccatttgtcattgcaagtaacaaagtattaactgaggaatgaggtttttgaaatgcagtatccatatcaagacgcagcgctgaccattcgtgagcgggtcacttatttactttcacgcatgagtacgcaggaaaaaattggtcaagtgaatcaacatctttatggatgggaaactttcgaagattctcagtcattaacgtttacagaaaaattcaaggcgcatgttgaatggggcggcggtgtcggtgcactttatggtttatttcgcgcagatccatggtcaaaagtgaactttgaaaatggcgttcgtgcacaggatagttggcgagttgctaataaagttcaagaatatgtcatggcgcattcacgctgggggattccagcattaattgttgaagaatgtcctcatggccatcaagggcttgaaggaatctcgtatccaacgaatattggccgcggcaatatgtttaatacgcggttaatgcagcaatcatcgcatctgatggcacaagaactagcgcttaaaggcgttaacctagcgcttgtttcgacgcttgatttggtcaaagatccacgttggggccgttcagaagaatgttttggtgaagatcccattttagcggcgcgaatgagtgaagccgttgtggcgggttttcaaggggatttaattcaaagtgatgttgctttcttagaccaacctgctaaaccgcgaacgactgatgccattggtgttgtattgaaacactgtattgcgcaaggtgaagcattgggtggccataattcaggcaccgtcacaattggccaacgtgaattttcagacgtctatgaaccccttttgagtagtgtcaagaatgcggcaggtgtgatggctgcttataacgatgtggatggggtaccgtgtcatatcaatcagccgttgttgactcaagatttacgggatgtaaatgggtttcaagggattgtgatggcagatggtgttgcgcttgatcggttatcaggaatctttgaaacacaaccagaagctgcggcggcagccttaaatgcaggtgtcgatctaagtttatgggatcagacattcctaacgcttgatcaagccattgaaaatggcctagtagacgaagctgccttagataatgctgctggccgagtactagcgttgaaattcctgttgggtctgtttgaacaaccctatgtacaagccccgaatgcgcaattgacggccttgcttgaaaaagctgatgcgctgaatctgcaagtggcacgtgaaagcatgacgcttgttaagaacaatgggcttttaccaatccggaatcagccgcaaaagattgcggtgattggccccaatgctgatgaattatataatctcttgggggattatacagcagcacaaagttcagcgcgtcaagcgcaaacaatttatcaagcgattcaagaaatgtttcccgagtcggaagtcgtgtatgcattaggctgtgaggtgcgtaattcaattcatcaagaagaggcaattgccaaagtagttgagcttgcgcgcgatgccgatttaatcatccctgtattaggtggttccagtgcacgtaattttgatatggccttcctaagtaacggggcagtgagttcaaaaggcatcaacatggattctggtgaaaatgttgatgtcgcatcacttagtctgtgggccaacaagaagtgctgctcaagcaattgaaagcactaggcaagccaattgcatgtgtcatggtgcaaggccggccatacgatttaacactggtaaatgaacttgcagatgctgtattgattgcttggtttcctggtcaacaaggtggtcgcgtaattgctgaaactttagtgggacttaataatccaagtggtaagttgagtgtgtcttacccgcgcaatacccagcaactaccggtttactactatcaacgcgatgctgctaaacaagatgattactatgatgaggttggccaaccgttatatccatttggttacggacttagttacgaccaatttgattatcgacaattagcggttaagcaaatggttgacaaactagttgtaactgttaaagtaaaaaataacggacagtttgtaggtcaagaaagtagtttattatttgtcaaattaactggtggagcagttattcaacgaatgaagctgttaaaagctttccaaaagaatgccttccaaccaggtgaagaaaagagcattactttcgaactacctgctgctgattttaattacatggatattgataatcaggtgaaacgtgcgcaagcagcgactattatggttgctgatttagcggagaaaatcactttatcgatataagcggggaataagaatgtcatctgttagagaagtcgctgaattggccggagtctcggtcggaactgtttcacggtatctgaatgggcaacagcttaaagcagctaatcaagccaagattgcagcggccattgagcaactcgattacaaacaaaatattatcgctaaaggattgaagaacaatcaaagtttttcaattggtttattgatgaatagtatttcaagtcgatttggcgcggaagttgtttctggaatagaacaacgcgttgagcaacaagggtatagtttattattgagtggttttagtgaccaaccagcgttaattgatcaaaaaattgattatttaatggcgcattcgattgatggtttaattgttttcttagcaggtgaagaatggcaaggaatggaacgactagcggcacttgatattccggttgtgacgattaataacccaaatcagctacgcaatgttgattcgattttattagatgatcgcgcaagtgtggcacaagtgatgcaacaaattattgatctcggacaccagaatattgggatgattgccgctaatcaggatgattatgttgcccgtgaacgactggcaggtgctaaacagacgatggcagcttatccagacagacagttacatgtttttgaaggtgactattctcggactagcgggtaccgcggtgcccaagcattattagccgaaggtattacagctttatttgtcagcaatgataatatggcctttggtgcgctcacttatttatcagaaaatggtattcggattggccaagatttactatttggtcactatgattatgccgatgaacatcaatttggacagttgccaatcctatcgattcaaccgccaacagaagcgattggattggcagttgctaagttgttattagatcggctccaaaataagactcagtcagatggtcaaacgattttaatgcatcatgaaatcaatggtctaaactgaatcatcgaaaagggcgagtagaataatctacttgtcttttttgagtttaatccttagattattaatttacccgtccccgataatggggtacacttgtggtgtacattattttgcatgattattgaggagggcttggcgtggcacaaaaaatgattttggatttagatactgggattgatgatgcgttagcaattgcttatgcattgggatcatcagaagtcgatttaatcgggattacctcagaatacggcaacgttttgactgaacgaagcgttgtgaatagtcaacaaattttacatttattaggtcatccagacattccagtttatttaggggctgggcattcgacgacgacgcatgattttagcgtcttaccaattagtgcggaaattcatggtcaagacggcgttggtgagattcatctgacagagccccatccggaaatggcaactgaatcagccgttgattttatattacgtgcttgtcaggcgtatggggctgacttgagcatcgtggcaactggcccgatgacgaatttagcgttagcgattcaaaaagatttactaactttgaagaaagttggtcaaatcgtgattatgggtggcgccttaacagtttgtggtaatgtgtctccatttgctgaagctaatatcagtcaagaccctgaagcggcggacttactctttaagagtggtttgccggtgacgatggtgggccttgatgtcacgttgcgcacactttttacacgcaccgatacggcagaatggcgcgcactcggtacaccagcagccaaagcttatgccgatatggttgattactatatcaaagcctatgaagtcacttctccccatttacacggctgtgccttacatgatcccttagcagtcgctgttgcaatcgatcctagcttagtcacgacttccccattgaacttgaagactgagatagaaggcccgtcacgtggacgaacaattggggataatgcccgcctagatgatccagcaacgcggacggcggtttgtgtacaagttgatacgccgcgtttcttaactgaatttaaatcaagaattggacaattattagcgcagtagaatgagccatatagaatttcaaaaaagagctacgacaaaagtcaattttttgtcgtagctctttttttattgtacaggcgactagcaagaataagtcggctaacatgtagtgtgaatcatgattgctgagccagtcaattccttgattggcgatggcaaaagctttttgaaagtggtgatcttgatagagtgccagactatacaggtagaataagatattaatgttctcgtcatagtgcgtgaaccgccctgcattcacaattgcgaggacgtgttcgaagtcagtttgattagtatggggtgtactcttaataaagctgatactactgagaatcaaaatctcagtaggcgttaaaacttgttggcgcggtgtaaacgtatagtcgagtgccatttgtagttcccgtaaactatccgtggttgtatgaagttcttggaatactgcgatgccatgatagtagtagtaggtctgtaaatcggtcgccagttcaaggtgttcggccaagccagtcgtatccaaataatctaacataccgcgataatcgtgtgcattgcacagttgtttaatttgttgattgaattcgggttgttgatcaatttcgggataatgacttaacagcgcttgttctaacggcatattaagccgttcgcagagttttgctaacaaaatggcgtttggaatataagtgccgttttcaatatgactaatcatcggttgcgaacaaatatcctgggctaattgatgttgggacaagccttgcgcacgacgaaccgtagcgagtttacgccccatggtcgcggcaagtagattatcgggaatagctggcactactaacacctcacttcatatgattgctttaaatttaacatgcaattttcaaaaagaaaaggagctggactgcatgccagtattgattattatattagggtttgcgtttattttccaaaagccattagtgtctgcagttaccattgtgtttggcgcgctattgggtctttggttactcagaggaataatcgtcttgatgatgttgataacacttggccattattggcgtcagaaaaattaaaaaagaccgctgaataagcggtctttttgattgcttagaattgatagtccgggtcaataatcaaaacgggtttgattgtttcacctttaatagaggcttcgttggcagtgttgatgtcttcgaattgataaaatttttcggttttatcaaaggggaacatgccttgacggtagaattcgattaaacgagggacgtcgatttgcggaatggagtcacccatgttgacgccgacgacggatttgtcgttgacacataagtcgttccaagtatcaagatcgatgtggtttggggttacggcaattgttgctgacaccccaccttggcaaagcgccttaattgaatcttccatgactggtgtaatccccgtggtatcgacacagaagttcacgccgcgcccatttgtgagggcttggattgctgcgacaacgtcgtctgtttgacgactgttaatcgtatcggttgcaccgagttctttagcgagtgcgagccggtcgtcgatgatatcgacagcgatcactttcgtacagcccgaaattttaccggccatcatggctgcgagtccaacagcaccagtcccgaagacggcgattgtgtcgccaggttttggttttaaagtatttaaaacagtgccactaccggtcacgtatccacaaccgagtggtccgagtttgcgtaagtctaaatcgtcagggactttaaccgcatttcgttcgcggacaacggttgtggttgtgaatgaagattgatcgaacatatcggcaatgtgatggtcattttcagtaaagtgggaactaccatcagggcgcacgccggataagttattttctgcgtagttgaggcattgtgttggaacgcctttgagacagttttcacagatgccacatgcgtagaatgagagaacgacatggtcgccaacttttaaactttgaacgtttgaaccgactttttcaataattccggaaccttcgtggccgaggacgattggatagccaataatggcgtcgcctttacgaagcgcttcgtctgagtgacaaatcccactagccaccatgtggacttgaacgtcgtctgggtggagtggtgcgagttcgatgttatctttaatgacaaatggtgcgccttgttgttcaacaacagctgctttaattttcatgcaatgatcttctaacttaattatttaattcacaagattattatagcattgttgaaatcgttttcaattaaaaattgacattggcgctaaaattgccaaccgtgttgttctaagtcccactggcgcttaggcagaccactcacatacgggttaccagcgacataatagcgataaggaagttgaccactcgctgctttataattgaccccgattcgtggcgcggtgacaattgatttggggtggcgacgatgcgctaaatcaatcattaaaggggcgtccgccacattttgaaaagtcagttgtttatcgtgaatgccgagggcgcccattaatttaccggggccgttagtcagttcgacgccaggtttcgggcgattgaggcgcatttgttcaatgccgtgggtcggttcgatggcgcgaatcaagacgccttgtggttgatccactgcttgggtcacgatatcaaatagaaagaaaccgcgtaattgatagatataaattgtaccaggctcatgatagagcggctcgctaaagggtgtgcggcgccaattgtaagcatgcgcggcagtgtcatcggtgccgacataggcttctgcttccacaatgaggccgccaagtgtgccttggtggctggtataaagcaagtgagttcctaataaatcttgcgcgatggcttgggtagaccggttcgtaaaaaatgatggtgctgctggttggcttgttgtcataattaaaacctccgagttaaaacgaatcagctttattttaacaccaaagacatgacatttgtcatctgtaagtcatgacaaaatcgtctaacgacaaaacggaatcacttctatactagggttattaaatgaggtgatgacaatgattgaaattaaactagtgacaatgcaattcgaacaacaagttgttttaaatcaggtagacttaagtgttcaacctggtgagattgttggcttagtgggtgcaaacggcgccggcaagtcaacattgattaatttaattttaggccgactccaaccaacggctggcgagattcggattttaggtcagaagccaacggagaaagaacatttcaacttattgggtgcgatgatgcaaggaaatgtccgactggatcgggtcagtgtcatcgaagaattagaattggtttgcagttattatcaacagccacggtcagtcgctgaattattaacgctagctgatttgaaggcacagactcataagatggtgtcccaactttcaggtggtcaattacgccgcctctcctttgctttagccatggcaggcaatccggatttgctattcttggatgaaccgaccgttggaatggatgttggcagccgacaaaaattctggcagcaaattgaacagttaaaagaagccggcaagacgattattgtcacgtcgcattatttagaggaaattgaacacattgcaacccggattttattattgaaagatggccagttccaattcgatggtgacttggcaacattacaacaacaatttaaaggaacgcagattcgctttacgactgatttaccagcagctacttttgcaaaatggccaggcgtgatccgcgtgacgaagactggggccaaggtgctgttgcaagttaccaagagcgatccgatcttaagtcaattagcaccaatgatggggatccaggttcatgatgtgcaggttcaagcaagctcattaaatgaaatttatagcgaaatgatggaggactaaaaaatgcaaacaatgatggtacaaacaaaaatagactttaaacgcgcatattggcgtaatccacgctttgttattttttcactcttaatgccgattgcgttttatctcttgtttacgaaagtaatgaaacagggtgtgatgaatgcagcattcaatcgacaatacatggtcagtatggcgacctatagtttagttctcagcaacacgtttactttatcgacattactttataatgacgcacgggatggcttggtttccttaatcgatttatcaccaaccagtcatcggacttattatggggctaagttgttgaacttaggcttaatcaatgctttaacgatcggcgtcattttcatagttgctgggattagtaatcaaattcatttagtgtggtccagttggttattaacggcgggctggttgtggtttgccagcatccccctttgtttaattgggattagcatttcatttttaaaagatgaaaatcagattcaactggtgtctagtttgttagctttccccttagcaattttagggggattatggtggccaacagaaataatgcccaaaacagctcgcgtgattggcaagcatttgccggtttatccgattaatcatattggccaagcgctgattgcgcatcaacccgcacacttgggtgaatatggcatcacgttgctctgggctgggttattactggcaattgtcgtatacttaaaccatcataaaagaggagcgatgcatgcatgaatttttttaaacgctacattgccatgccaccccaatatggcttatttccatatgtttggttgattttcttgctctttccaattggttatgcgtttccgtatcaaacggttaagcagcaagcgattatgggcttgattctgattttcttggtggcttatcgcaatgggtatgtcgcatcgcggtatcgcacattctggattatcttacaaatggtgaccagtgcgattttagcagtcattatccaggcgttttatctgaatatttatactgcctgggtgtttggttcgattcccatgcgccgccgaagtttctggcgctattactacgcttatctgttgtcactaatcataccagcggtcaccctatattggtattatggtggtcatatgggacgcgataatctgattggcttaatggtgtacggcttgttctgcatcttttcaccatttgcggctagctcgattcagcgtttcaatcggaaaaatcgccaattaacgcagaccaatcagcgattaaccgatatgattaagcagaacgaacggcaacgaattgcacgggatttacacgataatttaggtcagtcattttcaatgattacgctaaaagcggaatatgcacgtaaattattggcgaaaaaaccggccgcggtacccgaacaactactcgagattgaacaagcctcccgtcagaatttaaaaatagtgcgtgagattgtcgctggtttacgccaagtgaccgttgctgaggaattgatcaatcaagaacggaatctcagcgttgcaggcattttactgctgactaaaaatgaagaccaacttgaagggattccacaacaaaatcaacaagtgcttgcgcaatgtttacatgaagccgtgaccaatataattcgctacagtcaggcaacggagtgttacgtggtttttaatcgaaccgcaacgacttttcagatgcagattgaagataatggtcgcggattgaaaagcgaagatcaatataagagtcatgggattgtgggcatgcgcgaacggttagaaacgattgatggagagttgatggtcgatggtcgccggggcacacagttgacgatgacggtgccacttaagatggagggaagggcatgattaaactttatttggcagaagaccagcaactattgaataccgctttagcgggcattctggatttagaggatgatttgacgatggtcggaaccgccgtcaatggacaagtcgcacttgatcagattgaaaccctccaaccagatgttgttttgttagatattgagatgccgggcatgacagggcttgagattgcgcgccaactacatacgcgtcagccacagattaaggtgattattctgacgacttttgcccaaccgagttatttcaagcaggctatcagcaccgaagtggcagggtatctattaaaagatggcccgagtgatgacttgattgtggcgattcattcggtcatgaagggcaaagttgtttatgcgccagaattagttgttgggctgacaacgcaaacgaagaatccactgtctgagcgggaaacggaagtattgcgtgcgattgctaatgggttgagtacgaaacaagccgccgaatcattatttttatcggatggaacggttcgcaattacatgtcgacgattttaagcaaattggatgcaagcaaccgcgttgaagcaattcagattgcacggcataatggctggctgtaagaggcagtaaaattgcctctatcatgattgttctctatgatgaaagcaaacaaggaggacgaaacaatggcattagcaaatttgcataaatgggcgtttttctatttttcaccagacttttcacctgaacaaaatacggtgattaaccgtaatccaatgggaacgtgcgagatgattaccgtcgggttcgatccacgtgctaaagaagatggttcaattattgaagtcgctaagcaattgaaggcagaaggcattcaatttattgaactctgtgggggcttcggaccaacctggacgactaaaattaacgaagcactagacttcgccatcccagtcggagcagtcatgtatggtccagaattcagaaaacaattgtttgaaataatgaactaaagagtgcgtcaaaagcgggtatactgcgagcattagcctaacaaggcgaatgattgctgaaagcaatcatttgacttgtgtagctaagcacagcagtatgcttttgaaagcacgtttcgaataagagtgcgttcaaaccgtttatgttctgaggattagcaaaattagacgaaaaagcggcgaagccgcttatttggctaattaggctaaacgcaggaacatggtttgaaaagcacgtttagaatgtgccgtcagtcgagaattccgtctaattaatattgtaggcctttgtaaaagttaattttacaaaggcctctttttttaggcttattatttaacttttgactgatgatttggtatactctacttattaaatgtaaggaggcgtgtcatgcaaagagggcggcagttcttaaaacttagtgttagtgcaatttttatattcggggtgttcttattatgccaagtttcgggggtgcaagccaaacaggttcttcagcttggcgcgcaagcaccactagataccattgatatctcgacttcaacgggatatggtcaaacagggaacatttatgaaagtttattccggcttggtgagaacggtaaaattgaaccaggcttagcgaaatcgagttcagtttcagctgatggtaagacgtggacatttaaactgcgtgatgccaagttcagtaatggtgacccgattcaggcgcaagattttgtctattcatggcaacggacattgaaaccagaaaccaaatcaccttatacaaaccttttcagtaatatccaaaatgccccagcgattgcaaaaggtgagatggcaccagaccaactcggcatacgggcagtggatgagcacacgttggaagtcacattatccacacctgtggcctacatgaaaaccttgatggcttatccattatttgccccacaggatcaaaaagtggttgaaaaatatggtaagaagtatgcgacaaacgcgaaatacatggtgtactctggtccgtttaagttagttaactggaatgggacgattgagaagtggcaatttgtgaagaacaatcaatattgggatcgcaaaaaggtaaaattagaccaagtcaactataccgtgttagaaaataccagcaccgcgctttatctttatcaggaaaagaaactggatttaacccagttggataatcaacaaattgataattatcgggatgataaagcattccacagatatccttatgcgttgacgaactacattaaatacaacttcaaatcagtagatgaacagaaaaaagcacttttgaataaccaagactttagattggcgatttcgttagcgattaatcgtaagacgttgaataaccggctattcggttcgaagaaaaacgatattactggtttcgtgccagtgggcttagccgattcccctaagaaggtggactttgctaaatcacaagccgtgccagataccgtggattacaatcaaaaattagcgcttaaacattggcatgaagcactgaaagcgactggtcaaaagaaagttgccctcaccttaacgcttaattccgatgatgccaacgcatcatatgttggtcaatatctcaaaggtcaacttgaaaaagtcttaccaggcttcaagttgacattaaagaccgtgccaagccaagtttcagcgagtcgtgataaaaaaggcgactatgatttattactcgcaggttggggggcagatttcaaagacccaatttcgttcttagaaatcatgttaccaggggctgcaagtaataccggtggcttcgacaatccagaatacaaagctgcccttgaccgcgcaatgaatgccgatgcgaacgatcctgacaaacgttgggcggacctcgtgacggctgcacaagtcatgaataaagtccaagggattacaccactctatcaaaatgatacggcatacttgaagaatccaaaggtcaaaggcgttgtgcataacacagctggcgcacaatggagctacaagacggcttatattaaatagcgtgtgaataatcagccagttatagcctaaggattaacaagaaaggcgccagtccaaaatctattttttggctggcgccttttttgtataaacaaatcattatggttctgaattttgctgtgctaaagtaagggtattcaataaaagaaagagggaccttaaatggcaaaacaatatgaaacaacgatgattaatgaagggggccgcaatggcttcgtttattcacccgatcaagcaaagaaatatgtaatcaagtcaccagggacagacccatcagggaagagtacaaatccagagcaactctttgcagccggctatagttcttgctttaacagtgccttagatgttgtccttaaccaagaacatattaaaggcgaacccacgattaaggcgaccgtttccctttatagtgatggccctgccaattattatattggtgttgatcttttcggtcacatcgaaggtttatcagaagaagaaacaatgaagtatctcaaaaaagcagacgaaatttgcccatactcaaaggcaactcgtggcaatattgacgtcacgattaatgtgatgtaaatcattaaaaaaaggaatcagcgactgctgattccttttttggtggttaagctttcgatgaatgtggtttgccttcttgtttgaggacggattgcatggctgggtcttgtcgcatgtgttgatcaaaacggtccagattagggaagtcagtcaatgaaaatgcgagtcgtcgacaccaattggtcatgacgaatagataagcatcaggagcactgaattgattagcaactaagaaggactggcccgctaacgctttttcaatataagcgatccgtgggaaaacccgtgaacggactaaatcttggctttcgggtgtattggggagccaattgcctttacgaaatggtgagatgaagttcttatgcaattcggtggcgatgtaattcaaccacatgcgttgttgccagtactgttcagtggcatagttcgccattaatggcagcgaactttggtgactaatgtattccaaaataacggcgcattcagtcatgaaatcgcccgattcagtttgcaaggctgggatgtaattcttcggattgagttgatgataatcactaagtgatgtggtatgggtatctaagttaactggcgtaacggtgatgaattgcaatgatggtggattataatggaattgacgaaagatactgtaattgcttctttgaaagcgttataataacgttgattaaagattggggggatcagtgatgagtacgaaagactattttaaattttttacgagcaccactttgacgggcgataacaatcgtgcgtatttggtgacagtgacgcgggcaatcgattctgagcaattgaaaagcgtgctggggaatactgtgacttattttaatcagtacggtgacggctttccgtttacttcgccgtttacgattgaccagttgaatccaatcgtcactgaacaaactgatttacaaccgactgaatttacgattattaaccatgggattggcaatattcttgcctaaaaaagggattgagacaaacgttgtgtttgtctcaatcccttttctgatggtcaaatctaatcgtctaagcgtgctcgggaaatcccagacttccgtcacactcttttaatttctagcatatttatgttcatcggcatagctgaaaaaatcggctttggcagtataatcaccgcgataaacgccgttccaaccagcacgttggccaaacgcgcctaaatcaatcaataggtgttcttcatccttggtgagatgaatcttgccaaagccaacactatagatgtaattggccaggcgattgacgagtgcctcgggattcttaaccgtatcaattttgaggtagacctgtagtaaaacatcggtaatatctaacaatgcatttgatttatccggatgcgccattagactgttgtaaagtgtatggatgttttcttttgcaattgattgacttatcatttaaacccctccaaataacaataattcacactagttatagttcctttttagttatttgtcaatgatgtagataagcgttatgattgtctcaacagttgattaagagtaagggacgattgaatatgaaatggtatgcagatggacaggaacgtgggcatcaagcaattacaatgattaaggcattattaaacgacttgaaacaagatgaccaagcggcaccattacaatcagttttgcatagttatcaaactgaaattgaagcacaaacgacagcagtaccattaattttgagccgaatgaacatcgcaattgcgaatgtgattcaaaaagaaggcttggatctatcagccagtcaacaagctaagttaaaagaaatgacggcattatcgatgattagatatggttattagtttagtaggggatccagaaagaaattgttgaagatcggaacgttatgccatcggattagcttttttatagttttattgatattaatgatgttcgtccatatggaagcccttttcgggttgagtacaaattatatgacgacgcatgaaccagcattgattgctgttaattttggggtgtggctaataatagtctttttgtttactagaatttatatgagacaaccaaaacctgactggcaaaatgtgtaaagagagccgatgctaaagaaagttgtacttattttagtgatgtttggtattgtgctagtgattgatcggatcgataaacgttggaacccattagcgctgccggagaatcaagtctatattaatgagctaatgaaggctgttccgattttgacgacactcagcaatgatttgtttgcaccaacactagaagaattattatttctggtattttctttaatctcttttttattaaaaaaacgaatgcgatacggtgatgaaaattattgtatcagggcttgcttttgggtgcgcgcatcagctgaaaattgactataattggcttatttattgttcatttggatggatattgggcagtacctatttttggacgaaggatattagatgttcaatagtgctccatatgctcgttaatctatttttaatagcacattgtagataaaatgatttaaatgaacgattataatgacagctaaaaagttaacgactgatttggtcatgttgaacacctcatcattttatttcatggctactctagtgctatcttgctggttaaacaactagaatgagaacttaataaccaccaaatgaaagcgttctaatttaaggccgttttgttttgacaatgcttgataagtggcttacatttaattgtgaaggatagcacaacctatccgcagacatttgtgtcaattcaaatggaagaggtggccagaatggcaacgaatcaattagtattaaaaaccgcagacatttgcgatatccgggatattgaggaagcacgggcaaccattaaaccgtatattcgcgaaacacctttaattcaatcgatgttcttgagtcgtaatgtggcgcacggtcatgtctatttgaaattggaaaatatgcagctgacgggatcgtttaaattccgtggtgcgaacaataaaattaaccatttaacgccagagcaacgggctaaaggcatcattacagcttcagccggcaatcatgcgcaaggggttgcattgaccgcgaagttattagggattgatgcgaccgttgtgatgccagaagaagcaccgcttgctaagcaacaagcgaccgccggttatggggcgaacgttgttttacatggtacgacttttaatgattcgcggttgtacatggagcagttagcagccgaaaagggcttaacaattgtccacccctacgacgatcgcgaagtcatggccggccaagggacaatcggccttgagattttggatgcgatttggaatgttgatacggtgattgtaccggttggcggtggtggcttaatctccggcattgcgacggctttgaaatcctttaacccctcaattcacatcattggggttcaatcggaaaacgtgcacgggatgacggcttcatttgaagcaggcacaatcaccagccatcatgcggacttcacgctagccgatgggacagacgttgcgattccaggtgaactgactttcccagtggttcaaaatctagtcgatgaaatgattttagtttccgaaaaagaaatcgcaactgcgatgaaggatctcatgcaacggactaagattgtcacagaaggcgctggtgcattaccaacggcagcactgctgagtggtaaaattgatcctcaatggttaacagataaaaatattgtggctttagtttcaggcgggaatgttgatttaacccgcgtttcgggtattattgaccaactcttccacccagctgatacaagcaaaggggttgttggataattaaaaagccggcatccgtctaaaaacggatgccggcttatttttgtgctgcaagaaaggctggaccatgatcgtcaattagggcgtgaaattcttggcagtctttaacagtcatttggggtaagagctgtggttcaataacctgttgtacctttaaatagtggaggtcttttaaagaacagtgctctaggtgagcaattaagcggcgggcatataaatcagcgataaagactgggcggtcgaagacatataataaaatgacatcggctgtttccggaccaatgcctttgatggcaagtaactggcgccgtaggtcagtggtggttgtcatctgattgagcgtgtctaagtcaaaatcaactgtcgctaaaaatcgaaacagccctttaattgtcctgcttttagcgttattgaagccgctgggtttaatagccaacataagggcttcatccgaaagagaaagcagattgtttggctcgaagtgcgtacttgatcgtagattggcgagcgagcggtcaacattttgccagtttgtattttgaactagaaccgcgccaaccattgtttcccaatgggaatcagaaggccaccagtgttgcggcccatattgccgatacattgtttgaaagagttggtagtaatcaattttaccgttcatgaaaaatgtttccttaacataaaaagacgctacttcacctttggcagtcacttattgtcaattcgcttggtgcgcagttgtagcagtttggaagttgtggctaatgagatggtggtcaaaatgatgaaaaaagtggttgaaagtaagaaacgcggcatctgcgccccagaaaattttaaaataatcgtggtaagggtactaaaagtggtgaggatgtttaaaatcatgagtgaaatttcgtagttgcccgattgtttcgaaatgacgtggccagcgtataataagccaacgccgaacaatatatatgagaaatagaaaataccgaagaaaacgatgaaaatagttaatgattctttggcgtagacgagaatatcggtactggtaaagatgcgaatcaaagtatttagaatctgataggtgagataaagtgttgctagatagataaaagtggggaagtttcgtttgataaaggccatagcaatctccattgtttttttattgtaaagcttgtcactattctagcatggaatttaagaatggtcagttgaaagtcagccgagaatgcgtttttatttgtaattaatatcatctgcgttatacttgagttgtgtaaaatagaataaggagtgatcaatgtgaaaattatcgttgtcggttcatctcatggtggatttgaaactgttcaagaaagtttactcgattatccggatgcaaccatccaatggtacgaacaaggcgatttcctatcgttcttatcctgcgggatgcaactctatttagaagggaccgtcaaaaacgttgatgatgtcagttatgcgacaccagaaggcatgcgggcaaaagggattgaagtcaacctacaacaagcaatcaccgcgattaacgccgatcaacatacggtccaagtgaaggatttaaagaataatacaacgcgtgaagaaagttacgataagttagtcttgagtgtcggcgctgtaccatttgaattaccagtgccaggccgtgatttagagaatgtctacgcaatgcgtggccgtgattgggcgattaaattaaaggcgaagacagttgatccaaccgttaaaaatgttgtggtgatcggttctggttatattggcattgaagcggctgaagcatttgctaaagctggcaaacatgttacagttgttgatgtcttgccacgtctattaagtctctatctcgatcaagaatttacagatcaattaacggctgaaatgcaagcgcacaatatctatcctgcagttggtcaaggcgtcaaagaatatgtcggcgttgacggtaagctaactaaagttgtgaccgatcaagctgaatacgatgctgacttagtcatcgaagctgctgggattcggcctaacacaggctggttaaaagatacattacaactcgaccgcagcggccggattgaaatcaatgaattcttacaaacaagccaacccgatatttttgcagtcggggatgcaacggttgtgaaatacgcaccaactggcaaagaaatgccaattgctttagcaacgaatgcgcgtcgccaaggtcgctatgctgctaagaacttagtcaccgccaaccaaccggtacccgctgtttcaggttcatcagcattgagcgtcttcgattatcactttgcttcaactgggattaaagaaggaacggctgataaaatgggtgtgaagacccaatctgttttggtttctgaaacatatcgcccacacttcgtccctgaagcagaaaatccagtggtcgatttcaaattaacctttgatccagaaacacggcgtgtactcggtgcgcaaatcatgtctaaagctgacgtgacggcaaacatcaacgccatttcacttgccattcaaggtaagatgacaatcgatgatttagcatacgctgacttcttcttccaaccaggttttgaccgtccttggaacatcatgaacgtcgccgcccaaaaagcacaacgacttttagacaaataaagtgcaagcagctgtcaattgaagattgatggctgctttttgtgctgacatggttcgccaaataggcttgatgaagacggtgattgtcattggattcgtgtattcagctggtgtattgctcttaacggggcttacgcttggctattcaagtgtaagacgttggcttagaaagaatcgctaataaaaaaggattgtggatcgataaaaatatcgattcccaatccttttttactatattacccaataccgatcacataatatgcgagtttatcggcgtagtgtcgttggttattttgttgtttagcttgcttaaccgcggtgagattgtcggtgaccacgccgtctgcaccgaaatacatcatgcgttggacggcttgttgatcattgggtgtccagacaaagacggccttattttcctgatgtgcagcttgaatgaagtgactgttgacagttgtcatttcaacggcataaaaatcagcgttcgaaattggtgggccgataaaattaaaggggagaatgtagcccgtttgaatcttcggtgctgcctttttaacggcctcgacgatgtgccagtttaaggattgcaccatgtgaccgtgagcttcgatattggcctgatacttattcaggaaatgttgcaccaagccgggattatcggtggtgggtgtcttaatttcaatcagtagtttttgatgaagctgattggcgcgtgcaagatagtcatcaaatgaagcaattggtgcggattgccgatgttcatggacggtcattttagtcagttgcgccagtgttttagactgcggggtccctgagtgcccagtgagtggggcaagttggaagtcgtgaaagacgacgaattggtgatctttagtcaattgcacatccatttcaacataatcgggctttaatcgggtagtttttcgcagcgcactaatcgaattttggacgccgtctttttgcgaaacgccacggtgggaaatgcttagcggctgctgaatggttactgaacggagatagtcccaattataagtcccaacgccgattaaaacgcaatttgctacgaataataaccaacgaccactgagctgcacgcttaattttaaggttgcatagttgaacgtcggttgcacaaattgtgggtcggccaacaaataatcaatgacgatgaaaaagacggcgactgttgaaagcaccaagttgatgagcatagcagcttgcaacaaggtcatgatgaccacggcacttggcagtcccactgatgtgtgggtttcaatcaacgcttgtagttggatgagtaggaaaaaagtgagtcccgtaaagccaatcagtgcggcaccgattaagagtagacgccccagtaatgagccaattttttgatgtgtaaactgccaactactggtcaacgcttttttgaaagtcatctgctgaagaatgatgtttggtagggtgaagatcagccgtaagccgagatataataagcccaaatagacaagaatgaaaagtcccgcgacaattcgccgattcatgagaatataatccagaatgaatgccggtattttaaacttagtcaataaatcagaatgatagccaagcccgcccagcggtaaaattaaaagacaataatatagaaagaaaaagaacgtgccaattcgaaggtgcctgagttgcgcaaaagtcatcttcagcaatgcctgcaaagctagcggccgtttaatctgaataaagtacacacttaatagaagaaacgtgaattcgaagaaagccagcaataaaattagtagcgcaattcctacgagtgctaacagcgcaatcggatgctgatgaataagcgctggcaagttgctcaacgcgagaaactggatctgattatgtaccagaatgaagtagctggctttactcaaaagcggtagacaaattaaaagcaaaaagccatgcatcaataacacactacgaaaataggcctgggactgctttaaaaaagtgaatgtacttgtaaataggattttaaaatactgcattgaatgggtgctcctcaattggactcgtaatgagataattgtacaacaaatatagaagcgtgtaatatcgattaatctttgtatttaatgaagagtttgttatagttattaagttaatagtatgaatgaaattgctaaagctatcttgtggaaatggtagattgtaaaaatattttagaaacaccaattacactaccctcaccggaagaacaaaccaagttgggtgaattctttgaaaagctcgataaccttatcgctgctaaccagcgtaagttagatttgctcaaggaacagaaaaaaggctacttgcaaaaaatgttccctaaaaatggtgaaaaagttcctgaattgcgatttgcggggtttgctgacgattgggaagagcgtaagttaggtgattttattgatgttaagtctggaaaagactacaaacatctgaattcgggatcaatacctgtctatggaactggtggatatatgctaagtgtagatagagcgctatcagatatagatgccattgggatcggaaggaaagggacaattgataagccttatttattaaaagcgcctttttggactgtcgataccttgttttacgctgttcctaaacaaaatattgaccttcaattttcactatctatttttaaaaaaataaattggaaaaaatttgatgaatctactggtgtacctagtttatcgaaaactgtaattaatagtgttggtgcttctgttcccagttatgaagaacaacaaaaaatcggttcattcttcaaacagttagataacactatcactcttcatcaacgtaagttagatttgttgaaagaacagaaaaaaggctttttacaaaagatgtttgtttaggggctataacttgattaacgggctttgaaattaggtcccgagggacctaataacttaatttgatggtcggttaatccgaaaatgacaagtcgttacagtggcctaatcactgtatccgatagcactaattggttttggcgaaccaattagtgcttttttcgtttatattgtattttaccgtctgactactttccaaagcactcaacgttattgtattaacatagtactgtatagatttgcaaaagcagcaagaatcaatataacaatctgttacattgattcttgctgctcttagctacattttacatatcgacatttaaataagttttattttaaaatgtcaatcaaatttttatccgccgcttgtctggctggcaatattccaaatatcaccccaacgacggtagaaattacaaacgatgtgacaaaagacgacgcagtaataactgccggaaatggtaagaattgggaaataatcattgccagacccgctcccattataaaaccaagtaaccctcctaaagtagttaaaattaccgcctctaacaaaaattgaatcatgatttcttttttctttgctccaattgccctacgtactcctatttccttcgtcctttctgatacagatatatacaacatattcatgacaccaattcccgcaataaataaggatatccccgctatagcactaatgaaatatgttattcctgagataacattgcttacaccactaagtaatgagccgatgtctatatattcatatttaccattagttttttggctgccattcttgtttaaattttttactacgttttttgcggccttttcgatattaacatttctttgaaaggttactttaattgtgtctccagttgattttgtctgtgcagatttatatgtcgttaagggcagtattacgtctgttgaaagaccatcattttttttatttttaaagacacccgttacagtatatgtcgtattatcgactgataaagacgaattgagcgcattagacggagaatcataatacttttttgcgacggaatcggaaatcattgccatgggttgaaatgaatttacttgagccttagaaaggttagaaccgacaataatattttcgttagtcgcttttttagttaaatggaatgttgcggatttcaattgcccgttaataattaatttatttgaaaacgaattcttattatccaaaattgaaattttatcaatagattcgtcagactgttttaaaagctctatatcttcagtagaaaatcctcgcctataggaattaggattcttatccgtgtacgttatttctatagtctgacgccctgagctatctgcttgtagattctttagcgtctctttcttaattccattccccaaggatacgatcacgacgaccgaagcaattccaatggtgattccaaccattgtaagtaaacttctctttagattagtttgtatggacttccatgccgtcaacaacacttcaatcactttcatgtcatgaattccttcctgtatcagataaaatagcgccatctgaaatagtaataattctgtttgtttgctgggcaagttgcaaatcatgagtgaccataatgatagtcgttttacgcttatcattaatttttttgaagatattcattatatctcgggaagttttactatctaaagctcccgttggctcatcggcaataataatttctgggtccataattattgctcttgcgatcgccactcgttgttgctgtccccctgatagttcattcggccgtttactttctaaattgggcaaatcaacaagatcaagcgtttcagaaaccacctttcgcaatgtagatcgacttttccctgcatataacaatgggagaactatattttcatacacagacaaattctcgattaatttaaaattttgaaacacaaaccctatgcttgtgtttcttaattctgataactgattgtcagatagctccctaatatccaaccctaaaaaatgatattgacctgaaaattcagcatctaacaatcctaaaatatttataagagttgactttcccgcaccagatttcccaacaatagataaaaactcacctttagatatcgataaattaatagactttaaaactggattttgatttgatccacggtaatacgacttaataagtttagtgatttcaatcatgtatacctaccttcttgttgtttctcaaatttgaatccggatccgttattatcttcacattttcaggcaagccagaattaacaattgcatagccatttttctcgctgtacgtaatagggaccttggatacttttccatcatttttgtagacataaacatactttttggcaacaacagaggtcgtcggaattcttattcctggatgagtagacaatatttttaatgtttgtccatccagatactctgacgaaatcggtgctgaaaatgagtattcagcctgaccatttttactagtatcatttgatacgaaattcagttcaccgacagtggtgcttgtcgtcttgtttgtagcaggagcaacaattttaactgtagaactattcatcaaatcatagtaatcatattccgatacgtcacctactgcgtttttggaatttgaatataccgtcaatgacggaataccatctttaaaatgcacactaattcttccgtcaattggagattttaggacgttgtactgagaagttattgtgttattcaagtcatttttcatattttgaagatcagtttgcgcatcaattaacgagtcgttaacttgtgcaattgatgttgaagcatcttgaactgaattttcagatgtcgcctgagattttaaattagctaactgatttgtgtactgggttattagacgtgattgcttgtcaatttcttgtttctgcttctgtatgtcacctgttttgtcatcaaaggttgttaacaattcttgattagctgtaacgtaatcgccacttttaatcattaatttagaaatgtttgtggatggtaattttaatgtgcgaacatccgctgattcgaccttacccgttaaactcaatgaagatgtcgaagtagtcataatgcggtaaagtctttgagtcttattcgtcgtatgtgtacgtccaaaaaaaataaaaataataacgaaaattcctaacagcgaaagaactgcaaccataatgacggtatttctacttagtttcataattactccttaagtaaattttcctctcaattcacatgaatatgaaaaacaatgaataaaaagttaataagagtggttctttaattatacacgaattataatatgctatgtaataaatgtttattcataataattaaactgtctattatcggtttcatatttgttgctatttacataataacccctaaagaatactattaaaacagcccccattatctagtgattagataatagggactttttttttataaatgatataataaccctaaaaaagaagctggaaaggttaatctatggttcaacacaaatcgtgctgccaataaaagactctaacgtcttaaaaatggtacaagacaccttattagatagttttcgggcgggtcgccgtaactacactatctttcaagtcggcaaggccaccttgctgcgggtgagtgatgtgatgacgttaaagaaatccgatgtctataatccagatggctctgttaaacacacggcctttattcatgataaaaagactggtaaagcaaatacattatatttaaagcccgtgcaacaagacttgctgcaatatcatgattggctggtacaagaaaacattaattcggattggttatttccctcaacggcccattcagaccgtcacattactgagaagcagttttacaagattatggcacgcgttggtgatctattaggcatcaactatctaggtacacataccatgcgtaaaacaggtgcttatcgtgtttatacgcaatcaaattacaatatcggcttagtcatgcatttattgaatcactcaagtgaggccatgacgctcacttatcttggcttggatcaagcaagtcgagagactatgttagatcaaattgattttggttaaactaatgccctaactagactcaagcgatactttagtgacttatcaagctaaaatttgctaacatttgtattaaatatataagagataagagttgatcatatgcaattagtttacagggcagaagaaaatctgtccgtaaatctagcataagagcactattcttttagatagcgatgtggggattgacgatgacacttacgaagaagttcaaaaatctatcgaacaagttgctgcttcggcagcgggtggagtgacaggaggagctctagtctctgtatttgccgctctagttcctatcgcagggactattttaggaacaatgtcagtactcaattggaaaaaattattaaagtgaggtaattaaaatgggaaaccttggatggtatcaattaatgacaacagttgcaaaaaaggtaggcggtccaaagcaactccttgctcttgtggcagcaggtggctatgtaataattcgtggtgttgaagcaggtggtaagaaggtaaggaagctagttaagaaggataataaagaaaaatctacttcaaaagttctaccagcatacaaattcataatagacggtaaggatgacaaaggtcttatattttcttcaggggacgttttttatgtagcagcgagacatgatgatgttatattaatcgaaaaagaaaaggatgacaacaacccttattttgtaagcgttgattggttaatgaaagtaagttcttttaaggacaataattaatttcctatgtaaggctctgatgtcaagccaacaccagaatatcgccgttttgaatccaattcaagcctgcatcaatgtgtacgttgaaattcttagtcctttttacaatcgtttaagtattgatgttcgccaacgtcgtaatcacaagcagctaattgtctctgatttacagattttagcgttgatgatgtttcaaatcgaacgccgaactgtgtcacaacgtcaatttcaccgcgaaatggttacgtatgggattaaaattcctgaatgctcacgttttagccgtcgttgtcatgatctcgctaaggacatgaagacaattcgaaacgatatgcttcaacgttggacgcgtcatactgcatattccgtgattgatagtgcgcctatattgttgtgtgcaccagttagaaatatgcaggctaaggtttttcacgatgtcgcaaacattggcttcaacgctactaaacacctgcacttttacgggttcaagtttcattgtgtcatgacgaatgaaggctatgtggcgggctatgaagtaaccaaagcgtccatacatgatgttagagtcgcagaagaattgttagaacaagctagttcatcgcgagttttaactgacgttggttatctaagtaaagacttgaaacagcaactttcaacgaaaggtatcaatatttggacgccattgcgtaagaacatgaagcaaccggtgaacgttgatataacgctgttaaagagacagcgccgacatattgaaacgatgttcaataacttgaatacggttgccgcatttgaacatccgcatgttcgcacagcggttgggctcgaagccctaattgagatgatgcttttatggcacaccatcaaggttcacgacaatctcatgcatcacatcagcgggttgaaaatcgtgtagataacaggaacgttaataaactagcaccacgcgtagttaagtattaaattttgtgatctaatagaatttgtggagtaataaatagtttgggtgaagtgaaatggacatagaaaaaatcattgactacatgaatgataatgttcgatggggaagcgaaataaaacgaagcgcaataaatgaacttattgggcaatcccaaaatgatcttaatttttcatatcgaatatataaagaggcgtctgatatgaatttggtgatcattgaagatgagccttcgtctttaaagaatgttatacacaatgcgggtttatcttggcaggatgacatgaaaaatttgcttcaaggattacctgaagaatttacattatcggatgtatatttatttgaccgtgatttaggacagatacatagtgaaaatcaaaatgttagggctaagattagacaagttttgcagcaattgagagacaaaggagaaataacatttgtctctgatggtgtctatcgaaaggccaaaattcaaagcaaatcagatagcgggcacttgcttgataatgtgatttctgaagatcccgattattttgacgatttcgatgactttgaagaccttgatgatgttttgagttcagaaaaatttgatgatcagtataagaatgtcgcagaaacacctgatttttctaataattcaaattacattgacgaatatcaaaaatcagacagcacacgggcgctagactcattgatgagggcaaatgagaaattagtggcaagtatagccaaaaaatatacaggacaaacaacggctagttatgactttgatgacatgattgtagaaggtatgctggggctgaagagggctgcagaaaaattcgattcatcattgggatatgaattttcgacttatgcaacctggtggattagacaagctattactcgtggtatagccgatcagtcaacaatagtcagactgcctgttcacatgagagaagtgcttaataaagagcgcaatgccgaaaataagttattcaaagacctatcacgaccggcaactgatgatgaggttgcggcgtttatgaacattgatgtggataaggttgttggttataaaaaagttcaatatagatttggaagcaatcttgtgtccttggatttaccggttggttctgccgaaagtgatacaactttgggtgagctaattccagaggatgatgtaaaaagcgaatttgacatagtgtcagataatgagcttagtaagaggttgaacgagctactgcttgaattgacagatcgagagcgtgaagtgataataatgcgatttggattagaaaactcgagtattcatactttggaacaggtaggtcaaaaaatgggagtgactcgagaaagaataagacagattgaagggaaggcgcttcgacgattaagaaatccagtaaatgcaaaacaaattaaagattggattgaagtggaagagtagcgtggagagaatggattattatggatcttaataacagaattgaaagtatcatcagtgaaaataatttagacaccccattggtaatattggttggatttggtcaggaaagttttgacaattggttcattactcctattgatcaaaagctcgatctaattgatttggatgatagaaaagctaaggtatttagtgaagccatggcaagtatggctaaaggtttgccttactatatagttcgacctgaagaatttagtttaatatcagaacttgtgggtgttatgtatcctaaggataaagttgtcattaagaatgatttgttcgatactaagtacccttacgatgattctttatcagatgttcagaaagcatatgaaatgctttatttgagtgaagatacagaaatagaaggaacagacaaacttaaggttgaacgaattaataccttttacggcgggatagactattctaaaaagtcaaacgaatattatatatcatataaaacggatttgtgggatgggtacccggtatttgatatcagtggattggaaaatgacgttgttcctcagttggtttctaatccaacggccgatattacgatggctctggatgaagaagagacggcgtttttggattttgaaattgaacaagattattctaactctgttaactttgtgattgaatcgttggatcagatcccgcatcgatatattcaccgtatttctgtaatgaaggagttacatccggactgggaagtttacttttctacacaatcaataaaacgaaatgacattgagagacttaatgaatatcgacagatacttaaaaaagtttgggggtatgatgacttcagagacctagaaatgtatgccacgattgagaagagagataagaagttaattaaaatatcacaagctcaaattatagatgatatcgtacaacaggctgagcaggcccgagggggtaatgactatcgtgatgtgtatatcactgcatcaactggggcaggaaaatcagtgatgtttcaggtaccaacactatacttaactgaaaaatatcaagatgataagccattagtgctagtaatatcgccgcttattggtttgatgaatgaccaagtcgatagcatgaaagcaaaaggcgttgaaaatgcagagacaataaatggtaatactcctccgtatgaaaaacagaacattttacaaaaagtagcagatggaactgttgacatgctgtacctctcacctgaaacgcttcaggcaagaggtgatattaagatgttaattggcgatcgaaaaattggaatggtgattgtcgatgaagcccacattgtaacaacgtggggaaaatcattcagagcggactattggtatttgggtatatatcttcaaaaactgcgtaaagaatttcagtttccgattgttacatttactgctactgctatttatggtggtagagaagacatgtacatggatacacgcaatagtctgaatatggtccggccgattgcttatttcggtgtggttcgacgaaacgatatttttatgaaggtatcatcatccgccgacgataaggatagagactatcgtaagacgaagaacgttcttgccttaaagtatctgcaaaatgcttcaaagagaggacaaaaatcgttaatgtactttcctacgatatctttgttgaacggattttaccaattcgtcgaaacaaatgcacctagtatagccaaggttactggccgatattacggtacgctcactaaggaagagaaggatgccgttttagatgagtataaaactggagaaattcaatttgttctcgcaacaaaagcttttggaatgggaattgatattccagacattacaaatgtttatcactttaatccaaccgggaatgttgttgattacattcaggaaataggacgagttgcaagaaatcatcaactcgtgcccaggggatttggcgttttggattttctgcctcaagatttgaacgcggtaaagaaattgcagggaatgagcgcgattagaaaaaatcaaattcaagccgtgatgcaaaaagttctagatatataccgggcaaaaggaaataatcgtaatattgtcgtgaatgctgatgactttaagtatatcttctcggataacttggacgatgataacaacaatttagacaacaaagttaaaacggtattgctgatgattgaaaaagatttttcctcaagccgtaagctgggttactctccattcgttgcaagaccgagaagtatttttggtaaggaattaatcttagctactaaagaggttcagaacacgcttgaaagttcttcgttgcgtaattatgtggaatacgtcgcgtcactccatggaggaaactatgcttctgtattgtccatagatctttcaggtatttgggaggaccattataagaaaatgtcgtttcctgagtttaagtacaaattaaacacacctgatgagcgtgaaaaattacgccattcgaagttgtttagtctgtttgtgttcgcgagcggtgttcaatatgagttcgatgatcaaaatagtacaaaacaggctaagtataaatcaattatggaaacttacttacgatttttagatactaaacaacgaactaacaaacaatttgatgctaaagagttaggcgaattcgttagaaacaacttacgtattagcgacccctttaaagcaagaagcttagcgcaagttcttatcaatgcaacttttgagtatcaaaaactcaaagatgtgaaagttttgaaagagcgagttgtcggggagaagactcgctttggggttatcagatctggagacattttttatgattttgttagtggagttactaataggatatatcatcccaagtacagttactttgaggatgaaggctcaatgaatatattccactataggaattctgaagaattttctgaagaaatgatagttttgggaattggagaagcttttgaattaggaagctacacaactctcggcggatataatcctcaaatatacattcgaattaattcggtttatccagtagaacaggccattaaagcagatcaaaaatacagaaactttatactagaagatgtaatgttgaagcatcgaattggcgtacttatgcagcgtttcttatttactcacaaagaaaatggcaattctgggaaagaactcgtagaaaaatatacggattggttctgggatcaaatagaagattattttatgggaaagttacctgaagaagttgaaactgagctttttcaaaaaaagtctagagcagatgaatagtgttagttgcagcgaaccattgtggttcgctttttttgtccaaggttagttaagatgaaatttttcatacaatactgctaaaatgaatacaaacatatgacgtgagaggtattcagtatgaagaaacgaatagcagttgttggggcggcaattatcgaaaataataaattgttggcagctaagcgttcagagggacgatcataatatataaatttaattagatcacattatttacaagttcgctacgaaaaagcaaacatagtcataatatggacgattttatgtggtgaaaataacccctagcgcgtaatacattgatagttttttgtagcgccataatcacacttctttttatctggcaaattctataattaatccgaacagaaattaaaaagcccaaagcaatcacttacaatggtagtagctaattccaaccaatatagggagtaattactttggttacatctactttatcacgttttcaacgtggcgcactagcacaactggtcaatgaggggaataaatcttaccaagtaatggctgacgccttaggcgtcgccaaagctacgattagctatgagttggaccgagttaaaccttatgatccagaattagctcagcaagatgcagatcgcaaaaggcggaattgcggtcgtcgttcgatgctgacggcagcattagcgactttaattaccaatcacttacgattaacctggtcaccagaaaccattgcggccgcttataacttgagcactgcgtcaatttataattggcttaatcgtggctggctccccttcaaattgactgatctacccaatcggaatgtccgccagcaccgagtgagcgaaaatcgtgggaaatttataagtgggacttccatcgaacaacggccaacaactgttaatcaacggttagcttttggtcattgggaagtagatacggtgctttctagtcgaagtgagtcacgatcatgtctggttacattcgtagaacgtaagacccgacttctatgggccatcaaagcccctaatagaacggctaaggctctaaacgtttatgggggccttcggtccccaagtaaaatccattactgttgatcatggtaaagagtttgccaattatcaggccttagaacaggattatcagatcaaagtttatttttgccatccatattcaccatgggagcgaggttccaatgaatattttaatagacggttacgctggttcttcccgaaaaagaccaattttagccaagtaacgactgatgagatcctagcagcacttgaactaattaatcaacgaccattaaaaatacatcatcaacagactgccattgaaagattccgggcttgttcggattaaacttgtaatttgccgaaggaaaaacgaaatcgggatttaaattttcaatctcaaaagagcagttagaaaattatgaactgcttgaagcgcttagcgagcttgaagatgatgcaatggccttgcccagagtaattaaattacttttgggtgatgatggtgctaagcggttgaaaaaccatgtgcgaaaacttgatggcattgtgccacccgaagcgatggcggatgaaatcaaagagattttacagagtcaaaaacaaacaaaaaactaatgatccttgccaagatgattaagctggacgaagatgccttaatcagtgatctcgctgaaacctaccaaatatacgactatcagcagctaccgttatcaacggtggctgctttttcgtgtaacttgcgcaatgattcacgcatcaaattgaagatgaaccagcaagcagtgccagtcaatacgcaagtgctcatggggattctagatgctgtgaacctgttgttgtggtcgcggtctaaagatgctgagcgcggtgccaaaaggccgcaatcaatcctagatgccgttatgggcaatcagaaaaagcaatctgcagattcggcagtcacttttgattctggcgaggatttcgaacgaattagaaacagattaatcataggaggtggaccaaatggcgactgagcttggacaagcatacgttcaaattgtgccatcagccaaaggccttagcggtgccatcaaagggcagttagatcctgaggcggattcagcgggtaagagtgccggctccaaaattggcaccggcattaagcttgccgcaatcgcaggtgtggccgccgttggtgccacacttgggaaaattatctcgtcatcattgtcggaaggtgccgacctccaacaatcgcttggtgggattgagacgctgtttaagggcagtgctgataaggtaaaaggctttgccaatgaagcgtacaagacagccggtttatctgcgaatgcctacatggaaaacgtgacgagctttagtgccagcttgctccaatcggttggcggtgacaccgaaaaggcggccgacattggtaacatggccatgattgacatgtccgacaatgccaacaagatggggacgagtatcggcgacattcaacacgcctaccaaggctttgctaaacagaactacaccatgcttgacaacttgaagcttggttatggcgggactaaggaagaaatgcaacggctcttaaccgatgcgcaaaaaatctccgggcagaaatacgacatgagcaatttagccgacgtttacaacgctatccatgttgtgcaaggcgaattggacattacaggcacaaccgccaaggaagccgccagcacgtttagtggttcgtttgaatcgatgaaggcttcactgtccaatgtacttggtaagttgtcactgggtcaagatattgggccatcgctacaagctttggcagaaacaacatcaacattcttgttcaacaacttcattccaatggtcggtaacattttaaaggcgctacctggcgcaatcacgacattcattgcggatgccgccccgagttttatggcgggtgggcaacagttgatcagtggattaacgcaaggcatggcgggtggcccgagtgctgtcacagcgtcattgggtggcattatgtcaacggtaacgcaattcggttcaacagttaaaacagcattgcaatcaatcttccaatcaattgggccggttatctcaagtacgttgggtacaatctttacacaactgccagcactattcacaaccgttgtaggtgcgattacaccaattgtagaaatgattggtgacgcatttaccaaacttgacttcagtggcttgcaaaacttagtgtcggcgattgtgccagctgttactgccggctttagcacaatgatgggcgttatcggtccagcgatttcaaatgtaatcacgtcgtttgtcggattgtggaatgcagcccaaccactcatttcagtattagccagtgcactaatgccagcacttcaaatagtgggcgcctttttaggcggggtgttcaaaagcatcttgtcgagtatttcaatcgcattcgatgccattcgaattgcaatcggatttttaacgccggttattcaagttctggtcgccgccttcaactttattgcgccggtattaacgactgtagccagttggattggtcaacttgtcggattattcggcaatctgggtggtgtcagcaccaccttgagagctattatctccgatagctttaacgggattaaatcagctatttcggtcgctggtagtggtatctcagccacaattgaaatcattaagggtgtttggacatcactgagagcggcaggctccgcacttgggtcaatgttgtctgcaatatggtctgggattaagtcctcagtgtcgattgctggcggtgggattagtggtgcagtaagtggcattcgagccgcttggagtggattgcaagcagccgggtcagcgcttagagccgcgatttcaggtgtttgggctggcattactggtgcagttcgtgtggcacagacaactatttcaggcatcgtaggtagcatcaagtcaatcttcggtagtctcggtaacattaatttaagcagcgccggacacgccatcatgaatggatttcttggcggattacaggcgtcatttgaaaaggtcaaaggattcgttagcggtattgctggttggattaaggagcataaaggtccaattagttacgatgcaaagttgttagtcccagccgggagtgcaatcatgggcggattaaataagagtttgcaagatgcatttcgtgcggttcaatcaaccgtttcaggtatggccgacaagttgagcctatcaatgacgcccgccattgcatttgacgaaccggccgctttgactggcaacaacctcgcgcagatgatgcgcccaacgccaacggtttacaacacctattcagcaccaacccaagacgtagccaacagcgcggaaatgcttgacttactccgcatcattgccgataaacgtactgtagtcgatggttcgtcattttctccagcgtatgaagaatacgggtcgacagaacgagcacgtcgtaatcaactaaaagcaaggggagttgcaattgacaataaaatctaagtattcatacgggattgaattcaatgggcacagatccaacgactttggtttggacgtgcaagccaaaacggtggggatgcccgccaagaataaaatcacgcaggcaatcccgtttagcaacaccgtcttggatatcagtgatctatacggtggccagacgtataaggagcgcaccatgaaaatcacgtttattgtgcgtgatggagaagaccaatccaaagagcgtctatattcgttatggacgcaggtcgttaattggttgatggcaccggcgcaaaaagtgaagctgaaagacgacatcatgcacaactattattacctgggcgaggtgcagaaagaaccctcatgggatgagatgcgcgcctatggtaaattgtcggttgaatttacgtgttacccgttccgcatcgatgaactggcggaaggcaacgacatttgggacgaattcaacttcgaaacggatatcgcgcagaatactgagtttgatatcgtcggtaaacgcaccattacgctgtttaacatcggagccacgtctatctcgcccgaactgatcgccagtgcgccgttcacgattgaagtaggcggacaacgatttacgcttaacgctggcacgtcaagcagtccggattttatgttgccaaccggtgagattaccatcaccgtgattggcacgggtaaactagcatttaattggcataaggagttgatctaatatgtatcgggtgacggtaagagatggctgggacggcacggagcacacaatccattcggagaacctgaacgacaccaagcttttaacggctaagattatgcgggacatcgatgcaattgattcgtttcaatttagcattagcccagagtcaccctattacaacgactttaaagggatgacgacgttcgtcaaagtgacgattcccaagcgcaatcaggtgctatttgaagggcgtgtgctcccaacaaccgattcgatggcgactagtggcgagtttaacaaggaaattacctgtgaaggcttgctggcgtttctacatgattcaacgcaggactattacgcgctagcaaacaacgacttgaagtcgttcttgcaacacatgattgatgtgcataaccgtcaagttgatgcgtttaaaaaaatcaagctggggcaagttacagtgactagcccgtctgataatgtctacaagtcgattgatgactcaaagacgacctacgagaccattaaagataagctgatcacgaagtacggtggtgagattcgactgcgccacgaaccggacgggttgtacctcgactacatgcccgagattgccattcaaagcaatcaagagattcgattagcgagcaatctgctgtccatcaaaaggtcgattgatcccagcgctatgtattcgattatcaagcccctaggtgcaagggctgaaacgacgacgcaagccaatgagggagattccgaaatatcacaaccaagattaacgattgagactgtcaatgctggcagtccttttttagtctcgcaaaagttggttgatcagattggccgtgttgtgcatccagaggtttgggacgatgtgaaagttacgtcaatcctgaaatcaaaagggcaagccatgctggacagtcaacggctgatcaaagagcagttccaagtgagcgcggttgacctcagtcttttaacagataagaccattgatacgtttgaagcgggtaattaccatcgcacaattaatcctttgatgggcattaatgagcgcttgcggattgtcggccagtcgctggatttgtgtaacccactcagctcaacactctcaatcggcgacaagctgctaagtcaggaagactacgagtcggcaattaagttgaaaaacgaggtcgctattcaagagatgaaagtcaaggtggcacttcaatccaccaaagtcaccgccatcaccaccgaacttgccacaacgaccgagaatctaaccaggcttcaaaccgagtacgacaagttaattgagaacatcggtgatgcggatttcaaagcaatcatagccaaattgaccaagctagagaatcaaacgactacaatcattaccaccctcggtgagattggtcaaaacgtgcttgatttagaggaatttaaaacaaatcaagaaacgctaaatacaaaacaagaaactgccaatgaagattttgaaaagcgcataactgcgttagaaggaggtaataaatagtggcagatgaaatcaaaagagatacagtagattatcgtgatccaacgccgttcgataattcaaaattgcaatcactaagtgaaatcagtaaagcgatgcgccacaaaacttatggcgaagatacccgggaagcgatggcccagcaaggggaagcattggttaaaattatgcaagaaacgggcggcaatcaatcagcagaagtcgtagcagctcgtagcaattttgagttgctcggcattcgcgaagacgcgcaggacaatgctattgctgttattaatgccaataaagctgataaaacggaaatcgcagctttaaaatctgaaacagatgcaaaattatccgtaaagcgtaacacggctactaagattaaacgagcagatatggacaccagcaacgacggcgctaaactagggttaattaatctttcagaagaggttcaagctgcaatggctggaaaagcaccggttatcggaagcgttgaaaatggatcaataacggaacaaaaaatcgctgcaggagcgatcacgggggataaactagtgcaaagcgtcctatccggctacagcttgattgttggcggagagattcccaattatgaccaatcgacgagaacgttcacgtttggcgatagccctaagctagcgctaattgcttggggaagtattcacagatttcaaatcccaaaagggcttaaaatcattaacacgccagaaaacgactacacggcgacgaggctcatgtttaatacagaatcgttgtcgtttagatttatctcttgggataataattatgaaccagccgaaatttgtataatgagtgttcgcgcagattggggggtgaactaggaaaaccactcattagcgccaatttcccggttttaattaacggagattatcctagtgatcacgaccgttgggctaagattgttccttcgccgacctttaaaccggactataacgactcaacccatgtttttgattttaattctcaaaaacgccttacgcttaaaaattcatacgagcctaaagtctttttgttgttaaaagactcaaaaggcgtggttatggaagataacgtaacggttattaatacagtggcagaaagcggtgcttcaacatatgccagacttatttattcagagagcgacaatagttttaaattccaaagaatcgacgctcctttaaaatttaacgactatacaattgcgatcatcagagataattctactgacaaaaatgcttcaacgagacaggcgatcataacttccccgtcagaaataacgattaacggtcttcctaattcaacttatgaagaagatacgtatgcaaatgtgattgcgattaaccataggggggcaagcgattttgcgccagaaaatactatgccggcgtttaagatgtcaaaaaaactagggttcaaatatgtggaaaccgatattcacttcacatcagataatattccagtgttaatccacgatgaaacaatcaataggactgcggttaatgatgacgggacagcgatcactgacacgattaaggtggcagacaatactcttgcgacgttaaacatgtatgattattcattaatcgaaaaaagacgtgtggacgcttatattggcacgaaaatggcgactttggaagacctacttaaatacggcaaacgagcaaacctaaaactagtgcttgaacttaaaatcgacttaagcgacgcacaaatcgacactgtgatggggctggtctggaaatatggcatgcaacgtaatattatttggcaaagctttgaagcgtcgcgctttaatcatttaaaagcactagatccaaaggcaaaactggcctttttatttggcaaagaaacaaccgctgatgataacctagccaagatgttaccttatagaaatgatacgaacgaaattatagctagtgttcaagcgggatcaaatcgagacgatttttataaatactcaaaaaatgatattagggtttttgtgtggacattttatgcagacggcgcggtgttggattggggagttaacaccgcagtaagcggtattatgacgcaaggagatattcagcaaggttatattctttctagacaataaaaaaagccctaatagggcttagtctaaatcacgaatcctttttgctggagtcccaacgtaaacgccattaggggtagttgatttggtcacagtggcattagctccgataacgcaacccttagcaattgtaacaccgggcataatggttgcattaaggccaatccagctgccatcttcaataataattggggcttctttgtggattccagccctttgttcagcagttccgatattgtggccgacacacaataatttaacttttggccctaaaaaaacgtggtccccaattgttataccggttccgggatagtttcgagtgtagatatacagatcatgattaataaaagcgtgactaccaattgtaatattatcagtgtcaatataatcaggctggcaaatataggcgccagttccaactttaatccccaatattttgagtacaaaatgaagtgcttcataatagttagacaagaaatctaacagttatggagctctttttatatggtcaaatacagttctagtttaaaagctaagatagttggtgagtatcttcaaggaaatattagtgccaaaggaattgccgaaaaatactatttgcctagaagacaagttgctcattggattcaaagatatcgtttaagcggtgtagattcgcttaaacgtagaaatgttaaacgagaattttctgccgagtttaaattagatgtgatagactactatcaaactcatgacgagtcacaaagtgaggtagccgctaaattcgatcttataccatgtcaaattagtatttggcgcactacttttaatcgagaaggtatattaggtttgaagcctcgtccgaaaggtagaccgaccaaaatgaaacgaaataaaaagcaattacgtcaattagtaaacaaaagtgaagtagaacgtctacgagaggaactcgcagaaaaaaacaaggaactttatgacactaaattggaacgtgatatcctaaaaaaatcagtgaccctgttcggaccctcaaagggaaacgaaaaacacaaatagtagatcagatcagggctgaccaagacgaattatctaaatccgatagatataaaataggtgatattcttaatgccataggcattaagaaggctacttatcatgacgagcgtaaaaggcttaaaaattatcaagacaagtatgcggatgtgaaaaaagaaatcattaagattactgaagatggaaaatttcgaggccggctaacctacggttatcgccgagtacaaaaagaacttttaaagttaaatatccatttgtctgacactgttattcgtcgtctaatggatgaattaaacgttcaagtatctatgtataatcgtcataagaatggcaaatactcttcatataaaggcaatgttggaagaatctcagacaacatcttgaaacaaacttttaatgagacattgccctacaaagtactacatacggacgtaacacaagtccgattgaaagataatagttgggcgtatatttctgctattacggatgaggctagtaaagaggttttagcatttaaaataaatgatagtcctaatagtagcttgataatatcaactctgaacgagttgattatcaagctacctgaatctgtgcaaccaataattcattctgatcaaggatggcattatcaattaaattactacactgaaaaacttaaaaataataatttcattcaaagtatgtcacgtaaaggaaattgtcacgacaatgccccaatcgaaagtttttttcatctttataaaacagaatgtttaaatggattcccaccttgcaaggatatttctgagctcacacaactttctaaagaatacgtcgaatggtttaatcatcgacgcatttctttgaaaacaaaaaatatgtccccggcagaataccgagaacatacattagttgcttaaaattttaattttgtctaacttttctgttgcacttcaaaaagcatagatttttcaggtgttttgtttaaaagatgtctaataaacattagctttaaccttttcatagcatcgcctccaaagcataattatatcacgatattaggccgctagctgcaaatatgagcaaataaggaagggatagaacgcatcgcatccgaatgatgaaggttatcggaaatttgctgaaaaatcgctaaatttttttctaacaattaagcaatcccattatggattgctatttttattgcatttaaattaatactgtaggaggaataacatggtttgagtaatgagaaagaagatttaaacgtgacagagatgctcattgacatccgtgagcgcctagtacgcgtcgaaacaaatactaggcatctagattcgaccgcaaccaaagttgaaaaggcttatagtattgccaaagaaaatcaaaaagatattggagacttaaatgagagatctaaatggactcaacggacagccattacagccatcttgattccaataggtctttttttatttgaaaaattaataggagggtaattaatgattaaaaaagtagattggcattcaaaggtgttgtggacttcgctgacagctctagtcattgtgttagttcagcaagtggccaaagttttcggaattgaattcagcaacgatttagctagccaagtacaaggcatcgttaatacggtgcttacaatcttaggcttaattggtgtcgtctatgacaccacgaagggagattcaaaatgaaaaaatcaatgaaactagtagtcgccacgatgacggctattttatttgcccaggcatcaactgggttagcgcaagcctctaaaggtgaccagggtgtcgattgggccgtttatcaaggtcaatttggcaaattcggatacgggtcagacaagtttgcgattgctcaaattggtgggcacaacgccaatggcctctatgaacagtggacttataagacgcaagtccaatccgccatcgctcagggtaagcgggcgcatagctatttttggtgggaaaacatccataatcgcgccaccgctgatcagactttaaattatgtcttaagcaaaatgcaaacgccaaaaggttcaatccttgcaattgacttagaacagggcgcgtcaacgtacgctgttaataccgatttagttatgtacgccatgcaacggattaaaaatgcgggttacacaccaatgttatacggtggccgtgattatttgcaaaaccatttaaacgttgatcaagttattgccaagtttggcgacaagctatggttagccgaatatcctaactacgcggtgacgccgaaacctaattacaactttttcccatcacgaactggtatcgccattttccaatttacatcaacgtatatcgcaggcggtctagacggtaacattgatttaacgggcattaccgacaatggttacacgaaacatgataatccggtgactgaaacaccggccaccgatgcgggtcaagaggcggacgacactgccaagaaagaaatcaaagtcggtaatacggtcaaggttaacttctcagcgcaacgttgggcgactggcgaatcaatcccaacctttatcaaaggtcaatcctacaaggtgcttcaagtcagtggcaaccgcgtgctattaaacggcgtcatgagctgggccaacaaaaaagacgttgaaattatcagcaccaacactggtaacacaacgtccggttcaacttatacagtccaatcaggtgacagctggtggtcaatcgccaaccgtcatggcatgagtatgtataatctggccgcattaaacggcaagacaatttatacaatgctatatccgggccaaacaattaaggtgtctggtgcagcatcaactaaccgcacatacacagtccgatacggcgactcattctggttaatcgccaacaagctaggagtcaatatgtacacactagcagctaaaaacggcaagagcatcaactcgatgatctatcccggtcaaacattaacatattaaaaaaagccctcgttatgagggcatacatattaattagtgaacctattaatcaaaaatggtacaagttttagttttgctttaatccggtatctatcgtttacttggtatttaccattaaaagccatagaaactgttgacttaccagtatcagtttcaagtttaagttgatactcagggatggcatctgtttcgaagtaagtaattttataagatgtcccaggttcaatagtcaccggttttatagatttaactggcttataacttccagtaggaataggtgagggattatatttctcaatcgttagtttcacaggtgtcgtttctggcgatatgtacagaactttatttgcatcttctgtcccatttagggtgatatcatcagaaatattcttatacaagggggctgtattgattggatagtgatttatgcttatatcttcatagtaggtgtagtttttaaaaaatgaaatccatagtattaaaaagaaaaggatcactttaacgataaaagataagaaatctagcgggtctttattatttaagtaccaacgatatggattcatttaatcactccgtgtatagtttattattctattatatcgtaatagttctctataaaaatactagaattgccgatattcaactttaatattgttatcaagtaatttgcgcagcacgttcttatattcctcaacccgctcaaaggcaaccactcccagcccatgactgtaagtagcgccgtccatttcttctagataaaaattataaggttcattaaaccggtctttaacaaccggcaacgagtatgagtgtcgtcatctgatcacctcgcaattattatacaataaacgtttgacaaatacgaatgtatgttcgtataattaaaacgcaaaggagtggttgaaatggaatacattagtttaaaaggcacgatcaacagcaccgttaaagttatcagctttaccccgtatctagtgcggtttgagcttaaaacggatgagcaatcctataactgtctagtcgctaaagatgcgtttaacttcgtttacctagcagaagagaatgcaccaatttcaatttttggccactttaataagcgcaagcaattaatagtcgataaataccatgtcaagaatgtaattcaaaaattatctgttgtaagatgagaacagaacaaaagtgggagcgagtcagatggaacaatttgcaccagcgcggatcaatgagcaatattatttaactctgaatgagactggcaaagttgagctacacaaagagggtattggggtggttggcagtatgagctactattacactcggaatgacttgcccttgtttatctgtcggcatgaacctagcgccaatttaaggacaattcatgatataatggtgcaactagatgaacagatgcaaaagatggttgaatgtggttgcttaatggttggcggtcaaaacgttgcagttcaaagataagctttaacccgtagaaaagagaccgcctaatttaggtggtctctttttgagtatgtaataggaaaagacaattattattgaccacatatggagtacaacaaaaaagacctgccaacataaaattgacaggtctttttacatttaccacacaagaaccacacaaagtgatgataatcgttggtataaaaggtatatctatgcgtcacccgggagtcgaacccggatctcaagaaccggaatcttgggtgctatccattacactagcgacgcattccgcgtactcaacagtacaatatattatattagcggagttaagcggaaatttcaagtgtaaattttgataaatcgcgataaatcaacgtttaaaaaatattcggaaagaaaacgtattcatcaaccccaaagcattgcatctgttttctgcacttgttataatggtcttgttcaaaaggataagttactagttttagtaagttgccttttattttttgccaaccatgggtcgactaatgacacagatggacattttatgtcccacggaaagtaggcgatagcaattgcgcgatgaattatctgcaatagaagcggttgcgccagatttcgtcggtatcattaagaaacgttaccaggtgttacaacatatcgattggctcgcgccagttggccgacgaacgcttgcggaacaactgaagatgagcgagcgagtaattagaactgagacggattttctgaaagcacaaggtttgcttaattcgtctaaatcaggtatggttttaaccgtgaaggggaatgaaaccctcgatcagttaagacaagtaatggatcaattcttagggttacatcagactgaacgtcagttgagtcaagtcttaggcattgaacattgcttgattgtttctggcaatagtgatgaacaaccaaaagtcctcaccgaaatgggcaaattagtcaatagtacgttacaattattattaccacaagggcaaagtattgtggcagtgatgggcggaacgacgatggctgaagcagctcatgaactttcaactgatctatcgaaacagcgcaatctaatctttgtgccagctcgagggggaattggtgaaagtgttgatattcaggccaatgcagtctgtgccgaaatggctaagcagacaggtggtaagcatcgggcattgtatgtgcctgaacaggtgagtgagaagacgtacgcgcctttgttagaagaaccaagtgttcaagaagtgttaaaactgattgaacgaagccggggtgttttacacagtattggtgaagccattgcgatggctgaacgtcgtgagatgccgattgaaaccatcaagatgcttaaagaaaagcatgcggtgggtgaagcctttggctacttcttcaatgcacaaggcgaagtcgtgtacaagattccgcgaatcggattacagattcgtgacttattgaatattccgtgtgtactggcggttgcaagtggtgcttctaaagcccaagcaatccaagcgtacatgcaccttgcacctaaacagacgtggttaatcacggatgaaggtgccgcaaactcgattttacaaggggcaaccctttaaaataaaaaatttttcatttcctaaaggaggaaattctattatgactacaaaagtagggattaatggtttcggacgtattggtcgtttagctttacgtcgtatttacgcaacaaacagtgatgtattggaagttgttgctatcaatgatttaacatcaccagacatgttagcacacttattaaagtatgatacagctcatggtcaattcaaccacgaagtatcagctacagaaaacagcatcgttatcgatggcaagaacattccagtttatgctgaatcagatgcacgtaatattccttgggttaagaatgatggtgttgacttagttcttgaaagtactggtttctacacatcagaagaaaaatcacaagctcatatcgatgctggtgctaaaaaagttcttatctcagctcctgctggtgctgttaagacagttgtttacggtgttaatgatgacacaatcacagctgacgataacatcatctcagcagcttcatgtactacaaactgtttagcacctttagctaaagcagttaacgatgctttcggtatcaaagctggtacaatgacaacaatccatgcttacacagctacacaaaaattacaagatggtcctgatcgtggtggtaacgtacgtgctgcacgtgctgctgctgctaacatcatccctcattcaactggtgctgctaaagctcttggcttagttgttcctgacttgaagggtaaacttgacggccacgcacaacgtgtcccagttatcactggttcattgacagaattagttgcaactcttgacaaagaagttacagctgacgaaatcaacgctgctgttaagaaagttacagaaggcaaccaatcatttggttacaacgatgatcaaatcgtttcatcagatatcattggtacagaattcggttcagtattcgatcctactcaaacacaaatcgttggcggtggcgcaggccaagttgtcaaagttgttgcttggtatgacaacgaatcaggctttactgctcaaatgatccgtacattagaaaaatttgctagcttaatctaatttcacttttgtgaacttaggaatgcgatagcattttataaggcgggaggaggtaaactccttccgcctttttttatgaaaatctaggaggtttgtccacatggcaaaacaaacagttgcagatttaaaagatattaaaggcaaaaaagtcttagtacgtgttgactttaatgtaccaatcaaaggcggcgttatcggtgacgataaccggatcgtagctgctttaccaacaatccaatacatcatcgacaatggtggcaaggcaatcttactttctcacttgggccgtatcaagagtgacgaagataagaaagaattgacattgaaaccagttgctgcacgtcttggcgaattattaaacaaagacgttgctttcgttgcttcaaacgaaggcaaagcattagaagatgcaatcaatgcgatgactgatggtcaagtattggttatggaaaacactcgtttccaagacatcgacaacgactttggcaaacgcgaaagtaaaaacgatcctaagttgggcgaatattgggcatcattaggcgacatgttcgtaaacgacgctttcggtacagctcaccgtgctcacgcatcaaacgttgggattgcaacagctatgaaagctaataacaaacctgcagttgctggttacttattagaaaaagaaatcaaattcttgggcgaagcagttgacgctccagaacgtccatttgttgctatcttaggtggcgcaaaggtttctgacaaaatcggtgttatcgaacatttattagctaaagctgacaaagtcattgtcggtggtggtatgacttatactttctacgctgctaaaggtttatcaattggtaactcattagttgaagaagataagatcgaattggctaaagaattaatcgaaaaagctggcgacaaattagtattgcctgtagataacgttgttgcagacgcattctcaaacgatgctaagacagaaattgttgaaggtaacattcctgatggctacatggcattagatatcggacctaaagcaattgctgacttcgaaaacgtccttaaagatgctaagactgttgtttggaacggccctatgggtgtgtttgaaatggacaactttgctaaagggacattggcaatcggcgaattcttaggtaacttatcaggcgctacaacaatcgtcggtggtggcgattcaacagccgcagttaagaaattaggcgttggcgacaagttaacccatatttctactggtggtggcgcatcacttgaatacctagaaggtaagacattacctggtatcgctgctatttcagacaaataatttaaaattaagaggagattttctcatgcgtaaaccaatcattgctggtaactggaaaatgaacatgaacccaactcaaacaactgagttcgtgaatgctatcaaagccaacttacctaagtttgatcaaacagaatcagttatcggtgcacctgctgttgacttacctgctttattagaagcagctaaaggcacagacttaaaagttgctgctgaaaactgttacttcgaagatgctggtgcattcactggcgaaacttcaccaaaaacattgaatgaaatgggtgttgattatgtcatcatcggtcattcagaacgtcgtgattacttccacgaaactgatgaagatatcaataaaaaagcacacgcaatcttcaaaaacaacatgacacctatcttctgttgtggcgaatcacttgaaacacgtgaagctggcaaagctgaagaatgggtttcaaaccaagtaacagaaggtcttaaaggcctttcagctgaccaagttagctcaatggtcattgcttacgaaccaatctgggcaatcggtactggtaaaactgcttctgctgaccaagcacaagaaatctgtgctgttgttcgtcaaacagttgctaagttatacgaccaaacagttgctgacaaagttcgtatccaatacggtggttcagttaaacctgcaaatgttaaagaaatcatgggcaaagaagacatcgacggtggtttagttggtggcgcaagtatggaacctgcttcattcttagacttagttcactttaacgactaatttttaacgcattcctgtttacgaatggcgtaaaattagctaaaatagatgtaggctttgcctgacatccaaaaaagcgctaatgcttagcattagccaaaaaaggagaaaattacatgtcaattattactgatattttaggtcgcgaagttttagactcacgtggcaatcctactgtcgaagttgaagtttacacagaagatggcggctttggtcgcgcaatcgttccttcaggtgcttcaactggtgaacatgaagctgttgaattacgtgacggcgacaaatcacgttttggtggcaaaggtgttttaaaagctgttgaaaacgttaatggtcctcttgcaaaagaaatcattggtttcgacgctacagatcaacgcggtatcgatgctgctatgattcaattagatggtacagaaaacaaaggtaaattaggcgctaacgcaatcttaggtatttcattagctgctgcacgtgctgctgctgacgaattaggcttaccattgtacgaatatcttggcggccctaacgctcacgtattaccaacaccaatgatgaacgttatcaacggtggtgctcactcagataacaaagttgatttccaagaattcatgattatgcctgttggtgctaaatctgtacgcgaagctatccgtatgggttcagaaactttccaagcattgaagagtcttttatcagctgacggtaaagttacttctgttggtgatgaaggtggtttcgcacctgacttcgcaaacaacgaagaacctttacaatacttgatcaaagctattgaaaaagctggttacaaaccaggcgaagatatttcaatcgctatcgacgttgcttcatcagaattatggaacaacgaagacaagacatacaaattacgttggtcaactggggaagaattcacaacacctgaattcgttaaataccttgaaggcttagttgctaaatacccaatcatttcaatcgaagatcctatcgatgaaaacaactgggaagactgggcatcaatcactaaagaacttggcgaaaaagttcaacttgttggtgatgacttcttcgtaacaaacactgattacctacgtaagggtatcaagatgggcgctgctaactcaattcttgttaaagttaaccaaatcggtacattaacagaatcattagaagcaatcgaaatggctaaagaagctggctacacagctgttgtttcacatcgttcaggtgaaactgaagatacaacaatcgctgacttagttgttgctacaaacgctggccaaatcaagacaggttcaatgagccgtactgatcgtttagctaagtacaaccaattaatgcgtattgaagaacaattaggcgatacagcttcatacaaaggtatcaactcattctacaatatcaaaaaataattgaatatgttcgtgtcggcacattttgaggtttaacagccggcgttaaaggattatgtttgtagtcttttgacttagggggttaccattgaatatggcgagcaaaacatatctagtaagagcatcttttaattaagatgctctttttttgtgcgataaattgaccggataaggtaatggattggattaggctagcaactaaataaacaatccccagcataaccggttgattaagaaaagcttatggagcattgcgcaataattaccagaataatcttgcaaataattacgtttgcaagcggatacataaacattagactatagatagcgtagagggattgaaacgaggagttgcgataagcatgaacaaacgagaacacgctattattcaatatagtttggcccagcataaaacgtactatgtcgacattgccgcacagttacagctttcagagcgcaccattgcaaccaccttgaatgatatcgaaagagccctttaatgtgaaactcgttcgaaaaccgaatgacggtatttattttaccggggatgtcgcgacattagccaatcatcttgaaaaaaaggccaatgatcgtccccaatccaaggaagaacgctgtcattgcattctggctaaattattattaggttcagcatcgattacgattcaacaactttctaataccctatacgtgagtcggagtacagtcgagaatgatttgaaaaaggtaaagcaaaaactcgcgcaattcggtcttcaattggcaatcacgcataccggtttatccttaatcggttctgagcatcaaaagcggcaagcaacggtggagttaatcagtcagtattggggaaaacggactgaggctaaagagttaaatggacagttagtgcgccatgttcaattaccggataatctgaatcaactgtttgaaccagccttgattaaaaacatactcacagctttaacggaattaattgaaaaaagtacgctatcatttactgattacgagtttcagttgttagcgattcatctgatgatgccagcaccaactggtggaagcaatggagcccaaccagtggtgacaccgttcattgccgaaacacagctgttagtacagattttagaacggcgatttgaattgacaattccggattttgaacaggaatatctcaaccgtcatttagtaacggtccaatcgaaggatacatctgttcaaactatccagaccgagttgcggcaatcagtcgggctgccacaactattacggcaacagcttgctcaattagcagttgatgaggaattaattcaggggttagcagttcatttaagttcggcacttcgccggcttgcaatgggattgagtattaataacccatatactgatgaaatttgccagaattttccgcaagcctttgatcaagcagtgttactaaagccggtgcttgaaaatcagtatcagattcaaatgaatgaggacgaattagcctttattagtttacactttgaagctttttttgaacgacattcagaagatgcacgcttgagtgttgtggtggtttgtagtagtggcattgggacatcgcaattattagggcaacggttggccaaaacgtttgctcaagaattacggattactcgtattattgccttgggagaactacttgcaaccccgattaaggaatcgctagtcatcagtacgattgcgattaaaggtttgtcagtgccggtgattgaagtcagtcctttgttaaatcggcatgatattggaatcattcgccagatgattactgaacaaccgacgcctaccaatcacttagtagctttattgcaacccgaactgacaattgtcacgcaagagcagttaacggatcaaggcgcaattgaattaattggtcagcggctcattgatcaagggtatgcaaagccaacggttgtccaggcagcgctggcccgagaagctttagcaagtacggcacttggtcgagtagctttgccgcatgcggattcacaattaattaccaagccagccattgggttgctgattgcaccccaaagtattaattggcaacacaacgacaaagtgcagctcgtcttctttatggccttgaacgaaactgttcatggccaaatgcgggcgatttatcatgatttagaccaattgattgaaaccccccgtcttttaaagcaagtcgcacaagcatctgatgggacggctgccctcgccatcttggcacaattgaatcagaaaaattagaatggagtgttaccagatgaaagaatttgatgttgaaaatatttttacagatatcgttgttggggatgataaaccgacggcattagcaacactagcgcaattatttgctgataagaatgggttagatcgggttgcattaaccgcgggattcaatgcgcgtgaagctgagagcacaactggttttgggaatggggtggcgattccacacgcgaaagtggcgggattaactcaaccagttgtcggaattgtcacgtttgaaactggtgttgattgggaagcattagatgacgcaccagttgaaatcgcgattgccctaattatgccgctcgatgaccctaataagacgcatttaaaagtgttgtcgaagtttgcgcgcaagttgatggatgacgcttttattcataatttgaagcaaaatcggcatgatgcaatggcactctacacgttagttaacgatgaaatcgaatttaactaggaggatttagaagatgaaaaagtttgttgggattacaaaatgtccagttgggattgcccatacttatatggcagctgaaaaactgcaaaaagccgggcaagctcgcggatatgaagttaagattgaaacacaaggcgcttcaggggtagaggatgaattaagcgccgcagatgtggctgatgccgatttcgtgattattgccgctgacgttgccgttgatggggaagaacggtttaatggcaagccagtactatatgcgaagaccgctgaagctattaaagattctgatacactgattgaaaaagcactaacggcaggtatttatggcaagaatcagccgaaaacagaagctaaacaagaggacagtcatgaacaaagtccaattattaagcaattattaaatggggtttcccatatgattccgtttgtcgttgtcggtgggttgtttattgccttgtcaatcgcgattggtgggcatccgactaaagcaggaatggtgattccaccacataccatttggagtagtatgaatcagattgggacgattggttttaccttaatgattccaattctcactggttatatcgcttatgctatttcggggcgtgcagctttagcacccgcaatgattggtgcaatggtcgccaacaatacagacatccttggtacaaaagccgggactggatttattggtgcgattatcgttggttttgcggctggttacttggttaaatggtttaattcatggcccgtaccaaaagatttacggccagtgatgccaatttttgtcattccgttattaggggttgggattatctcagccgttttaattctcgttttaggcgcacctatttcatggttgatgacggcactacaagatatgttaacgaccctttcacaaaatccagaaacgagtgtgattcttggcgttgtgattggtgcgatggtcgcgattgatatgggtggcccagttaataaagtggccttcttattcggggtggcatcgattacggctggacatccacaaatcatgggtgctgttgcttgtgccgttgctgttccaccattggcattggggattgcaacatttgttcgtcgcgatctttatacagaagaagaaaaatcagctgggattccagctatcttaatgggcttgattgggattactgaaggcgccattccatttgcaacagctaacccaaaacaagttttcccaagtatcattgctggttcagcagttgctagtgcagtcgggatggtcttcaaaatcaccgatgcagtgccacatggtggcccaatcgttggggtgttaggtgcaaccaataatattggtttgttcttcctctcaattttggcaggggttgctgttgcggtcgcaattttaaccacatttaaggtacgaaaagcacggaaagcttaatcttaaaagggcacacgagtaatcggcgctctttttttgtgggtaaaaaagttatgaacatgcgcttttttgaattatataaagcgctgtctatcgaattttgataaaaactggtataatagagccaattaaggtaaaaaggggtggcagtcgtgaaaaaaggagatcgccaagcacgaatcgaacaaatcattaatcagcaagttgtttcgacgcaagaggatttattagcaacgttgaaacaagatgggattgatgcaacgcaagcgaccatttcacgtgatattcgggagatgcaaatcgttaaggcacgggatgtgaacggtgagctccgctatacgatttttcacgatgacgaacgcacccaaactcagaaattaaaagataaactgcgtgaagtggctttgtccattacacaagtgcaaatgttaaacgtaattaagacgctcccaagtaacgggaatttattagcagccttaatcgatgatttggggtacccagaagttgtcgggacgctggcgggtcacgatacgattgttatcattagccctagtgaggaactagcagccgaattaaacgaacgtttcgcacaacatctagcaacagcgagataagcaaacaaataagacgttgcgacaaaagtaattttttgtcgcaacgccttattttgttgagctaaacatgttctgtgttaatcctcaggagatatccggctgataactcactctttaatctacatactggttaaaaatgtctgggatgggggctgttactgttctttgttcatccgtgaagggctctgtgtagcgcaacgtttgcccgtggagtagtaggcgctgtgttgaatcggttggaaagtacaacggatcacccaaaatgggatgaccatcagccgccaggtgcaagcgaatttgatgtgttcgccctgtttcgaggttgactgccaaggttgctgcaggtccttttcgatgcagtaattggtaatgggtcactgcggataaacctgtgatgtaatcaatcgtgcgtttgcgcttattgtatggatcgacaccaattgggaggttaatcgttgcatgttccaagagtgtttgttccggatcgttagcaatagcgatgtattggcgcgacattgttttttgactaagctgtcggtttaaaatgccgatgacgattggggttttaccaatcaagagcacgccactggttgcttgatcgatgcggtggaccatgtaggcctttttatcttgtttagcaagataggccgccacttggttcattagggtgaagttttcaccaggaccgttcggatgggttttaatccccgccggtttattgacgaccagtaaatcatcatcttcgtataaaacggaaaaagattgccgttcatcaagttcgtagtcttggaccttaacggaaacttctgagaagttcatcgtaatttgatcgccagcttcaacgtgtcggttgaaggcgagataatgtccgttgaccaaaatatcttgattaatccgcaagaaatgttgcattttttgcggcactaaccagtgattcagcaggccgcggacagacatcggactaaagtcgggcgctaaagtcacttttttttggtaaattatcattagagttcaaccacctttaagctattagtttagcgaaaattggtgtaaaagtaaattttaaaagattgttaatgtcttcgattggcatcagtgtcaattgacgaatatgctacaattaaacaagattaattttgaccgtaagaagagggatcgcatgaacaagcaagattcgccgttttggttggcgattaaacaatttatgaaacgcgtctggcgcgtgattcgttatgtctggtatcgactacaattgacgagatggctgattctcgctgttttaattctcattttcgcgatgagcagctggctcacgtttaaagcgaagacggctaacgtcggtgagattaaggccaacttacaaaccccaacggcgctttatgacattaaggatgaacgcgcggggacgttatattcgcaaaaagggacttatgtcgatcttgataagatatcgccgcagattcaaaatgctgttttgtcgactgaagatcggaccttttataccaatcatggattcagtattaaagggctagcacgagcagcagttgggttagtgattcatcatgggcagattaccggtggtgggagtacgattacccaacaactcgccaagaatgccaagttgagtcagaagcagacgttctcgcggaagtttgaggaattattcttagctgttcagattaccaaggtctattccaaacaggatatcttagcgatgtatttgaataatgcctacttcggtaacggggtgtggggcgttcaggatgcgtcaaaacggtattttggtaagaatgcgagtgaattagatgctagtgaaggcgccgtgattgcagcgatgttgcggagccctagtttctataatccggctgaccatttagataatgcgactgcgcggcggaacttaattctcggcttgatggtcgataataacaagttgacgcaagcacaagccgacgctgctaagaaagagcaacttgtcgtgacgaatacctacgagcagtcggatgggtatcgttatccgtattactttgatgaggttgtgaatgaagccattaaccgctttgggttgaaagaagaagacctcgttaagaacggatacaagatctatactgccctcgaccaatcccaacaaagtaagatggaaaccacctttaaacaaaattggttgttccctgataacgctgcggatgacaccttagttcaaggtagttcagttgcaattgatccgaaaaccggcggggtatcagccgtcgttggtggtcgtggtgagtatacaatccgtggttatagccgcattacacagatgaagcgtcaaccgggatcaaccatcaagccattggcggtttatacgccagccttagaagatggctaccactatgattcatcacttgaagataagaagcaaagctatgggactaaccactatataccaacgaacccggataacgtttataccggatcgatgccaatgtatcaggcgctagccaacagtacaaatgcgccggcggtttggttattaaatcaaatcggcctcaaacgcggcattaagtcggtcgaaaaattcggcatttcagtacccaagagtgaccaaaacttggcgatggctctaggtggttggcaaggtggggtttcaccttaccaaatggccagtgcttatacggcttttgcgaataacggtgaattgtctgaaacacattttattcggaagattgttgatgcgagtggcgccgtgattgttgataataccgaaccatccaagacacggattatgagccaaaaaacagccaaagaaatgactagcatgatgttgggcgtttataataatgggactgggcgttatgcgaaacccaacggctatcaagtcgcagggaagtctggtagtactgaagtgcctgatagttatggctttgggaccaaagatcaatggttagtcggttatacgccggatattgttgttgcgacttggatggggtatgacaagacggatcaagatcactttatgaagaacactagcattgacggtttagcaccaatctttaaatatgagatgcaacaactcttaccaaccacagcacagacggactttgatactgaagatgctcaatcgttggcgaaaaaagaacagagtgggacatcgaacgaattagtcgattcaattgaatcgggttttaaagatgggataaataaagcgaaagatacagccaatcaatggtataataatttgaaaggttttttcaattaaatacatggaaaaaggagtcagtacaatgacagttaatatttatgatgatgccaaccaaatggcaacgcacttgcaagaattaccacaatttttaggcttacaaaatgcctttgcagcattgaaaaaagacgatattgccttcacaatgtttaagaaattccaaacgcaacaaatgacacttcaacaaaaacaaatgcaaggtcaagaattaacggacgacgaaattaaagaaatccaagaacttgctcaaaaaattggggatatcgacgcaatcaagaacttgatggaacaagaacgtcaattaagccaaacaatggatgaattaaaccaaatcatctcaaaaccaatcgcagatatctaccaagcatagaatgcgtttgaaacgggtttggctttgaggattaacctaaaaatgagactgatggcgtattttgtcatcagtcttattttgtagttaactggaaaagtcagtttcaaaaagcacgtttcaaataagagtgtgactgattgcggtcagcaactgagcattaatacaaaaatcgcgttaatccaggttctaggattaacgcgatttttaaattaagcggaagttgttgcaaccagaagcacgtttcaaacggtgaatcgattgatttcgattcaccgcttttttattgcctaaaaacagaacgtttgttctaatcgcctttatcacaccgcgtggcaatggtataatgaagcttatctaagctggttacgaccggccaaaagaatggggtttttcaagatgaaatttatccatgcagctgacgcccatatcgacagtccgtttgtcggattaaaacaagcaccgacagcattgtgggaaacaatccatgcgtcaactttcacggcgtttaaaaaattaattcagacagccatcgatgaagccgtcgattttgtattattagttggtgattcatttgatcaagaagcgcagagtttgccagttcagaaatttttaaaacaacaatttgaacgtttggcagatgtcgacattccggtctatctgagttacgggaatcatgattactgggatgccaatcaagtgcattttgaattgcccgccaatgtccatgtttttggagcacaagtagagtcgtttgaactgactaccaaaggacatgagagtgtgaccattgtagggttcagttatgatcaacggtggttgtcagctgatcgagtggttgattttccacaacgtgccagcacaacttacacgattgggacgttgcacggtagtcaaaaagcaacggccgatacagatcactacgcaccatttacgattagtgaattgaacgcttgccattacgattattgggcattaggtcacattcataagcgccagattctccaagaacgaccagcgattgtttacccggggaacttacaagggcggcataagaatgaacctggtgaaaaaggcttttatttagtggataccaacgatggtcagttcgatttaacgttcaaaccaacgacggtcattgagtggcaacgtcaacagtttgaggtgacacctgacatgagcttaacgcaattgcaaacggctttgagtgcccaattgatgcaaagtgatcacgctagtttagtggcgctagagctaacacacgcggagcgattatcgagtgacttattgcaacggattaataatggtgaattattggcggtgttacaagaccaattggaaaatagtgaaccactgcattggccatacgcgttgaagttgcggtttgcagcacaacagcaatttagtcagattgaccaagcctactgggaacaagcggctgcagctatcttgacaccggacaatattctggaaaaagcaaagccgttaatgaaggaaaactttatccgggaagcaattgaaacaccagaatttcaagcggatctcaaggacttagtcacgacaattctacaagagaagaagatgggggattagccatgcgaattaagacagtcaccattttgggcttcggtaagtggcatgatcagacgattgatttgaataccgactatcaagtcctttatggtcaaaacgaggcgggtaagacaacccttacagcctttattaaaggcgtgttattcggctttgcgaccgctaaacaacggtatgaacaatatgtgcccaaaaacggcgcacaatacggtggtgaattactggttagctatcatgatcgcgatattgtgattcggcggctttccggtaagtttgggggcgacgtaacggtcatcgatcaaggccaagaatttggcgctgattacttagctgacctcttggcaccagcggatgaagctttgtttacgcagatttttgaaacgaaccaacaggatttaaatcagatatttaatctaaaacaggctgattttttgcagcatttattgacgattggtgcggtggggagtcatgagtggctcgactttgccaaggaactggataaggacagtcagaaaattttcaaaccctctgggcgtaagtggccattgaatgttgctttgaagaattatccagagttagtgcaatccgttaacgaagctagtcgtggttatcaagaatatgaaacgaacgcacgtctattgcagagtaccgttgcgacaatgacggaacaccaaaagcaagtggctgaattaaaacaacgccaagcgcagttgcaacatttgcttgatcgttggccaagttatgcggaatggcaagcacttcaaactaaacttgaaaaggcaacgccgtttgacttaacgattgacgaacaataccaagcattagtggtcgaacgagaacgcaatgcaaaggcgttagcagaagcaaaatccgaggtagcaactgttcaagaaacattggatcaaacaggtgaatttcgattttatcaagctaatcaagagacgttggtgccattgtttgaacaattaaatgaacagcaaaaacaaattcaattacttggattacggcaaaaccaaagcgcacaactcgctagcgaaaaagcccaattagcagcgcagtatcaatggcaaacggatcaactaccaaatcctttgacagatgagcaacgcgcacaactagaacaagccgaagctgaaatgaatggggcaaccacgaccagtcaagtgctgaccaagcaactggctgatttagaggcgcaattagccacgcaaaacgcggcagttagtcaggttgaaccacaagaaacgccaacgactgatggacgtgccagtcaattgagtatgctgattggcgtagtcatattcatgattggtcttttcttgccgggcgctctgaaagtcattgcggtcgttggactagccgcacttggctatggtggttacatgatgtggcaaaataaacaatctgaccatgaccaaccagtgcaaaaacaagcttggcaacaagcgctcgctaagttggatgtgttgcaggctgaaaagcaaaccaagacagctgccttacaagcacaacaagcaatattgcagacgatgcacgaacaaagcgcggtattattggcgcaaactggctacgaaacggcgatgccaatcagtcaagttttagcgatgcagcatgctttaagccggatgactcaattgaccatggcgctcaaacaacaacaagccgaaaatcaagcaatcgaagcggcactaaatatgtattgggatgcgtttgcttttgcccgtgattgggtgggggcgttacagggcagtcatgaagagaacttgtcccaggtgagccaattcaaagcccggattacccaactcacacaagaccttgcacaaagcagcgagagttaccggtattatcaacaacaagtgacacgcttaacagacacgattaaagaacaagacgctgcacaaacagcattgctagcaaaggctaacttaacaaccgccgcagaattagccagttgtgttgccaatgagcaacagcgccgtgctaatgaacaacgtcaagctgatttaaaacgcgaattggcaacggacttgtcggctttacaagcaatcgctagtcaagaacagcttaagcaacaagccgctcaaattacagaacaagtggcaagtttgacaagtcagttacaagaacagcaacaagctgttgcgcaactacgcgtgacgcaagcgcaacttgtcgataatgacagttatcaacaacagcgacagcgacaattacaagaacaggctaagattactgatttagcccaagagtggctcgctaagcagttagcaattgattggattcaagcgacgctgaaggccgcttcacaagaacggttcccccgtttattggaaaaggcaacgcagtattttgcaattctaacccagaatcggtatattaagattaacttcgatgacacactgatgacggttttacgggcggatcaagtgctttttgaagtcggtgaattatcacaggggactgcagagcagttatacattgcgctacgctttgcgtttgcagaagaggtagctgacgtagtctcattacctttattggtggatgatggattcgtcaactttgatgatcaacgccaaatcgccgtttggacattactccaacgactcagtgcggccaaccaagtgatttatttaacggccaatccgcggacgcaagcacactttgaagcggatcattggttaaatctagaggaagtggggctgacacatgacagcaaagaaattatttgattaccaaaacgacgagaatctggatttatttgtactaattaaaacggcggacgtgcggattgctaaaaacggcaagcaattcatcgcgtttacgttccaagatcaatcgggacaaatcggcggtaaatactgggatgcttctgatgaagacgttgctaaatttacggcgggtcaggtgatccatttacaaggtaagcgggaattataccaaaataatccgcaagttaagatttataaactgcgcttaacgacgggggacgaaccgcaaacagttgaccagtttattcctaaagcaccggtgcaagtaaccgagatgcaagacgaatttggcgcgatgttattcgaaattacaaacccaaattggcaacgtttggttcgacatttaatgcaaaaacatcaagcggaattcttcagttttccagcggctaagaccaaccaccacgcgtttagtggcggcttggcctatcatacactttcaatgttgcgcttagctaagacgattgctgcccaatatccacaaattgatgaggcattgctatatgctggtgttatcttgcatgatttaggtaagacgctagaattgtccggtcctatttcaacggaatacacggttcgtggcaatttgatcggtcatattgtactggttgatgaagagatagtgcgggcttgtgatacattaaagatcgacgtgaatgctgaggatatgttgctattgcggcatgttatcttggcccatcatggtttaatggaatatggttcacctgtccggccacaagttcttgaagcagaagttctgcatcaaattgatgaattagatgcaagtatcacgatgatgacccagtcattacaacatgcggaagcaggtcagtttactgaacggctcttcgcaatggatgggcggcgtttctatcgcccagtcgaagatcctaatttagatcaaccaacagaataaatgtacaaaaagacccccgctgctgtcgcagcgggggtctttttgttaatgcttatttagatgatgattttgaagctttgctgttaacgccgtagcttgaaaggatgtctgataaatctttgtccttgatagatacgttagcgttcttaagtaccttagtgatgactttgttcatcactgtttggtctttaagccatgaagcgtaaacgatgtctgttaattctttcttgtgatcagccatcttacctttaccagggttcttgatcatccggataacgtggtaaccataagttgtcttaacaggggttgttgtatattcgtttgtctttaatttgaaagcagcagtcttgaatgttgagtcaagtgatgtatcagtactatcgaagacaggtaatttaccgccatctttcttcgtaccagtatcagttgaatatttcttagctaattcgttgaagttctttgttgagttgtcttttgcaagtgcatcaatgacttcttgagctgtttctttcttttcaactaagatatgttgaacttggacttttggttcgtatgatttccattgtttcttcaagtcagcattggttacttttttgttatcttttagtgctgcttgtgttaagtattgtgttttgatgctgttcttaaatgatgtaggtgtcatactgctttgtgcaagcacagagttgaatgatgaaccgtattgttttttgtaaccatcataagttttcttaacttttttatcgatggcttttgagccgtattggttttcaagcgctttttgcaagatcatttgttgcaattgttgcttgccggcagatgtttccttgatttctttatagtattcgtcttgagtgattttaccaccctttaggcttgcgatagtcttgctaccacaacctgctagtgaaactaccattaataaactggcagcggctaatagccatttcttcattgtatgacacatccttatcaaagtatttatgaataaattcgtagtgaattcaccaattaatataacacataaactaactaaattgaacgaagcgtctaaaacttcacagaactttcaaatttaggttttacgctaaaaacgcgggaatcgttgatatgcttaaccttatcgcttgcatacaatctaatttttggtgaatttatttttttaagttttgtgtcaaacgatcaactgattcttcgatttgagcaattcgtggtgctgcttcaaatgaaaatgtttgcaatgcatcactgataccaccaagtgatgtaactgcagttgttttgagttcgtttgataaattttgcgaagctgtttgcaattgaacagcactttgttgaacatcagttgaactttctgagagctcgtttaaatagcgggcaatcgcttgttgtcgtttggggccggttgtagaagcggtgagaagggcataagccgtccctaataagccaccaactagtaatccttctgaaaatgacatgattagtcctccaattgtgcgtgaataccatctgcgatcgcttgtagttggtcagcagtgtaatcagcgctattatcaccgaattgcattgcaaatgaatcatccgctgtgtaacgtggaataagatgaatatgagaatgaaaaacggattgataagccaccgcaccgttattattgcagatgttcattccttggatggctggattgctagctttaatagccttagcaatctttggaatgcgactgaaaacggccgcagctaaatcagcatcgtattcaaagatgtccgccacgtgtttttttggtaccaacaaggtatggccgggtgtcacttgtgtgatgtccaagaaggctttgacatcgtcgtcttcatagaccactgtgttcggaatttcatttcgaacgattttgcaaaagatacaatcatccattaattatgcctactttctcttatttgaagtctcaatacagcttaatgctatcataaacaagggcttttcgctactgccatcagctttgtaagcggatggaaaaatattgagtgggggcatacactcgcagtttacttcgtgttaagatatgatatgaaaaaggattcactaaaaaagtagttttaaaaaccaaaaaacgaggctattgattatgagtttagagattaaccaattaacggggggctacgcgcacgtccccgttttaaaagaggtcagctttactgtgccaaacaatcaagtggttggtttaatcggtttaaatggggccggcaaatcaacaactattaaacacatcattggattattgacaccacaaaaaggcacaattactttagacggtgtgacgttacagtcgaatcctgaccaataccgccaaaaagtagcctatgtgccagaaacgcctgtcttataccctgaattgactttaaaggagcatttagaattaacaatgatggcttatgatttaaacgttgaagagacgtgggttaaagccaatgcattgttaaaacgattccgattagacaataagttagactggttcccggttcacttttcaaaagggatgcggcaaaaagtaatgatcgtcaatgcatttatgacaaatgctgacttgtttatcatcgatgaaccttttactggattggatccattggcaattcatgatttattagaaatcattgctgaaaaaaaagcacaaggagctgcaattctaatgtcgacccatattctcgcaacggcgcaacaatatgctgattcatttgtgcttttaaatcagggtcgcgtacgaacgactggcacgcttgaagaattaaaggttgaatttaacatggctgacgccgatctcgacgatatttatctgcagatgacgaaagaaggttaaccatgcaagcattatggcaaaaacgcgtgcaaaaacatattcaagaacaagtgaagtatttgcgcctcgttttcaatgatcatttcgtgattgcgattatctttttattaggagcgttgggctacacatatgctaacgccgtcaaaggactggatccacaagcttggtggctaaaacctgtattgagtttagtattacttgcggcagttagttttggtcgcctagcaacattattaaaagaagcggatagtgtcttcttattgccaaaagaaagcggccttgtgacgtatttgaaatcagcacgtttatatagtagctggttaccattaattgcaatggcttttgtgacgcttctagtggcgccactcttgttaattactaagacggtcccggcatggcacatagccgttgccttgattacattggtaatcatcaaagaccgccgcttttcaatccagttgcgtcagtggtaccaagcggatgaaacccaggcaacaaaagggctttcgttaatcctcgatttggcaataattgccagtcaattatatcagtggctaaatttagtcggagtgcttgtagcgcttggactagcctattatcagcgacaacaattggcgcgtgttcaaaagacacagctattcgattggttagcggcagttggtgcagaagattcacgaatgggacgaatttaccgcctctataacctcttcacggatgtgccagggctcagtagtcaggttaagcgtcgtcgctatttagatggcttattaaagccaattatagctaaaccagccaatacttacctctatttatatgcgcgtggctttttgcggggcacagaattcagcgggttatatatccggttagttgttttagggggcatcattctgtgcttcagtcacatatggtggttgagtttggcactcggacttctattgatttatctagttggttttcaattattaccgttttacaatcagtatgatcaaattattttcactcatctatacccagtaccaacgaccaaacgaattcaagcgttcagccaattaatgcggactttattattgcttcaggcgttactctttagtgtcattttattagtgacactagggatgacgattcaagttggtttaagtgttttagcattgttcgtgctcgtgattggctttgttcaattctatttgcctaaacggttgggggcatagtccctgtgacacgcatgctttcctacttgacgactactggctaattattatatgatacccttagttattagacagttgaagcaacgtgagcgctgtattttggcgctttattttattgaagaggagtcgaggctgatgaattttgacctggatactggctggcaagttcgtccggccggtggtgatacgggcgctgcatttttaggcgttcgcgcgtcagaaaagattttcctaaagcgcaacacatcaccatttttagcggcgctctcggcagaaggcataacaccacgcttaatctggacgaagcggatttcgagtggggatgtcttaaccgcacaagagtggctcaacggccgaaccttgaaacgtgatgagatgaatagcccacaagtcgctaagttattagcacgggtgcatcaatcccaactattgaaacgaatgttacaaaaagttggcggtcgtgtctggtcagcaaacgaaatgttgcaagcctatttttacgacttaccgcaagatttacggcaacacccatttttagaacaaacagctgattatttgaagcaaacgttacgtcaattacaagcaccttctgcagaggtgtgccatggcgatttaagccataagaattggttgttatcggatattaatcgactctacttagtggattgggactcggcaatgttagccgaccctgcagtcgatttcggaatgattttatttcaatatgttccacgtcaagaatggcacgagtggcttgagaactacggcctagaggtgacgcctgaattaatgatgcgcgtcaactggtacggcagtttgaacctactccaaagcattaagcaccattatcaacgtggtcgttttactgaaatgaaccgtgacatattgcgcttagaagcagtgatttctgaaataattaataaaaattaaatgccaaaggttgggcaagtgtccaacctttttgattggcatcaacaaggagaacataatgcgtttaagaaataaaccttgggcggcggacttaattgcggccaaccccagcatgattttagtgagtccggaagatatcgccggcaagtggcaaacacgttttgccaaagaacaacccatttacatcgaagtgggttcaggtaagggccaatttatcactcagatggcacaaaaatatccagaccggaactttatcgcagttgaaatccaagaatcagcgattgccgtcattttacaaaaacaagttgaattgaaattgccaaatctccaattattattgggtaacggcgcagccttaacaactttctttgctgaaaacgaagtggcaggggtgtacttaaacttctctgatccatggcctaagacgcgccatgaaaagcgccgattgacatataagtcattcttagcggaataccaacaaattatgcaaccaacgggctacttacgtttcaagactgataaccaaggtctattcgaatactcattgatgagcctgaatgattatgggatggtttttgacgacatctcactcgatttacacaatagtgaacttgcagaagacaacatccaaacggaatacgaagaaaaattcagcaagcgcggccaagtgatttacagattagaggcacactacaagtagagtgctttcaaagctggtcagcacccgagcaatagcctagtctggtgaataaccaatgcaattggttgtttgccggacgtagctatgcacagggtgctagctttgaaagcacgttttagataagagtgcacttgacgctcggtcagattttgagcattaacataggctggcgaatgagtgatataatcgctaatttgacaggtgtagttaggcgcagaaatctagcgtcaatagcacgtttcagcaagagtgtttttatcacacgggttgcctttgaggattagcctaagaaagggattgatgggggttctttaccatcgattcctttctgtagctaaccggaaaagacagtgtgataaagcacgtttcaactcaaaaaggtacgttatccagattttatctaggatagcgtacctttttaattataatattggttgaaacgtgctccgcgcggtatgttcctgcggttagcaacgtcagtcaagcgaccaataaattggtcactcgtctgactaagctaatcctcagaacgtgcccaccgcgctgcgcactctaaatttgtgagaattcaatcacgacgccggttcttgcgtctaccttgaatcgaaattggtttgtaccatcttcacgctcgcagatgatgccaccttgatagactggaaaggtccgtttgttttgtgagaataagtggggactttcttcaatccaagaacccacaatctggccttcatgttttaagccggctttaacatcttctaaaatttggtttaatttgatcattctttgttgcgcccgatattgcttcgcactggcagccgccgccagcgcaaaaccgatgccggttaataaatatttaaacgtttgcccattttttttcaaagaaaaactcctcagtcgtttttgtctttaaatagtatagcataatttttggtcctaaggagtggacatttacggacaaaccgcttatattaaaacgagtagtaaaattgaaggggtgcataatgaaagaattagcagcgatgacagatacgaatctgactcatctgattactgaagggaaacatgttttattttttacagcaacttggtgtagtgattgccggtttattaaaccagccatgccagaaattgaagctgaattcccggaatacgactttattgaaatcgatcgggaccaatttatcgatatttgtgaagaatgggaaatctttgggattcctagctttgttgtgattgataacggtaaagaaatcggccgttttgtcaataaagatcggaaaacaaaacgcgaaattactggatttattcactcattgaactaaccttgaaggagtcattaaatgttaattgcaagtatgaaccaagcggcttttcccaacatcttagtggtaatgacccaacctgatgttgaaaagcaagtgacaactgaaaaacaatcaatcgtacggattagtgatcaggcagatcaaaccatcggctataatttcttagcggtgaatgagttattgcccgatttacaattcaacggtgttcaaacactaactgaacagcaagttgctgttttaaatgaagcacttgtagcagctggtttcaccggtgatttagtggctgatgaaacaccacacattgtcgttggttatgtccaagaatgtgatgtgcatcctgattcagaccatatgcacgttactcaaacacagattgcacctgatcaaaccgttcaaatcgtttgtggcgctgctaatatcgcacaaggacaaaaagtgattgtggcgacggtgggcgctgtcatgccagaaggtaaaattatctggcctggtcaactccgcggtgttcaaagtgacggcatgatctgtgcagcccgtgaaatcggggttgctggtgctcctgctaaagggattatggtcttgccagatgattgggaagtcggtcgtgaagtgacagcagatgcagtcgcagccctactaaaataatccatcttacgattttgttatgggattattaaaattaaaatagtatgataatagatagcaattaattggttaaagataaaccttttaattgttatttcgttttgcagtcaattaagcagtaaaacacaaaagaggggttaaacatatgtgtgggattgtcggatttgctggtggattatttgatttaccaaagaaaaaagaagtattgaaccaacaaatggacgtcattaaacaccgtggaccaagtggtgatggtgattttatcgatgataaagtcgcattaggctttcggcgtttatcaatcattgatttagcaaagggtgatcaacccatttataatgaagaccacactaagctagtctttttcaatggtgaaatttataattatcgtgaaatgcggactgaattgatcgcacttggtcacgactttaaaacagattcagatactgaaaccattttgcatgcttacgaagaatggggtaaagaggttgttacaaaattgcgtgggatgtttgtctttgtcatctatgacttacaaactaagcaattatttggtgctcgtgatttcttcggcattaagcccctttattacacgactttagcagatgggactttcatgttcagtagtgaaattaaaactttcatgcgccatccagaatttaaaccagaactaaataagacagccttaaaatcattcatgatgaatcaatacaatgatttacaagaaacgttcttcaagggtgttttcagattcccagcaggccattatttcacttatcaagatggccaattggacatcgaaaaatattgggatatgtcatttaatccttcaaacttatctttcgaagaagaagtggctaagattgatgctgcagttgaagaatccgttaaagcccataatgtggctgacgtaccagttggggctttcttatcagaaggggtcgacagtagttatgtcacaagtattttgcaaccgcaagaagtcttcagtgttgggtttgatgatcaaacctataatgaagtcacagcagcccgggcgcttgccgatgaattaggcttgaacttcaatgaaaccaaagtgaatgccgatgatgcgtttgctgaatttgacaaaatccaatattacttggacgaaccagatgggaacccatcatgtgtgccattatggttcttgtcacgctttgcccgtgaaaaagtaacggttgccttatctggtgaaggggccgacgaattattcgctggctatgtcaactacggcatgcactcccacaattcaacaattaaggccttcacttctggcttgaagaaattacctaagggtgcgcgtgccagtttagccaaagccgttaagaagatgccagccttcccaggtcgcgtccatttatacacgaatttggcgaacccgcgtgaattctatacgggtcaatctgtgatttttgatatcgaaaatccaagtatttttggggcagatgaagccaatactttcttgaaacctgcttatcaaaatgatggaacgattcaagcaaactatcaagctgattttgataacgttgcggatgctgatccagtctcacaaatgcaatatatcgacttacatcacttcatgttaaacgatattttgcaaaaggctgataagatttcaatggcgcacagcttagaattacgcgtgccgttcctggatcctaaggtggctaaggccgctggtgaagtcccaactaaatacttaattaatagtcatgatacgaaatacgcttatcgtcaagcttctgctaaacatttgccaacagcttgggccaaccgtcctaagttaggtttcccagtgccaattaagcaatggttagaagatgacaagtattatgaaaaagtcaaagcactctttagcgaagatttcgttgcagaattctttgatcaagataagttattggccttgttagatgccaataaagaacaacgcattaacggccgtcggaagatctggaccatctttaccttcttaacatggtataaagtctacttccaaaatgtcgaagattatttagcattaggctagagtgtgacctatagaatccgtttaagtgcagccacaaaattaatttttgtggctgctttttttgcgttttagagatcaatcaattgataacagagaaaaataaacattcattatttagctcaaacccgcattatggtaaactataagggattagtttaatcatatagataattgtgatttattgaaaagaggacgtttaaaagatgataacaaatgacacagtttaccattttgttgggattaaaggttcaggaatgagtgctcttgcacttgttttaaacgacctaggctatcaagtacaaggctcagatatcgatcaatatacgtttacacaacgcgatttagaacgagcaggaattaaaattctgccattctcagaaactaatttacacgaaggcttaacggtgattgccgggaatgctttccaagatgaccaaattgaaattaaaacggcccttgaaatgggcttgccagtcgttcgttatcaccaattcttaggtgaattattgaaaggctatacaagtatcggcgtggccggtgcgcatggtaaaacaagtacgagtggcttattagctcacgttttaagtggtgtggctaagacgagttacttagtcggtgacgggacaggtaaagggattaaagatgcgcaattcttcgcatttgaagcggatgaatatcgccgtcatttcctagcttattcaccagattatttaatcatgacgaatatcgactttgatcaccctgattattacacaggcttagatgatgtgtttgacgcgttccaatcagaagcttacaaagttcaaaaagggatttttgcttggggtgatgatcctgaattacggaaaatcaaagctaatgtgcccgtttattattatgggacacgcgaagacgatgacttccaagcccgcaacatccaacggacggtgcaaggttcagaattcgatgcttactatcatggcgaaaacatcggccattaccacgtcccactttacggtgaacacaatgtcttaaacagtttagccgtaattgctgtcagtcatttagaaaaaattgatggcaaagaagtggcacgcgaattggcagacttcaagggtgttaaacgccgctttacagaaaagaaagttgctgacgtgacaatcattgatgattatgcgcaccatccatcagaaattaaagccacattggatgcagcacggcaaaaatatccagacaaacaaattgtagcggttttccaaccccatacgttcacacggacaattgcgttaatggatgattttgccgctagcttaaaccttgcggatgaagtcttcttaacggatatctttagttcagtgcgtgaaaaagcagggaaggtttcaagtgctgacttaggtgcgaaaatcactaaaggtggccgcgtcttgaaattagacaatatgtcaccgctcttagacttcgaccaaccagtcgttgtcttcatgggcgctggtgatgtgcaaaaatacgaatatgcttacgaagaattattgagtaatttaagtcctaaagataattaagatttaggcattttgattgtctttctggatggatttgttacaatattcctaatcgggtgattatgggcccgtttagaaatataagaggtgaatattcatggaagaaagacgcgttgtgaatgtcgacagcgaagcccgctttttcagtaaagtgtatggtttgatggctgtcggtgtcggaatttcagcactgattgctgttttaatggtgactgtgtttaaagcacaaacttacacaatcctatcaagtggtagctcgtggatggtttggggcttgatgattgcagaattaattttagtcgttcagattagtcggcgttcaatgaagaatccaacggcctcgttagccatgtttgtggcatatgcggcgttgaacggattgacgtttacggccgttttactggtgtataacattggtgaaattggggcagctttcgcatcaagtgctttagtgttcattgccatgtcgatttatggtcgcatgacaaagaataacttaagcggctttggcaagtttgcaatgatggggttaatcggtgtgattattgtctcattggttaacttcttcatggcatcagctgcaattagctacttcttgtcatacgctatgttaattatttttatcattttaacagcatgggacaatcaaaagttaagtatgatgtaccgtcaatacggcgcaactggtgaaatttcggtttctggtttagctgttatgggcgcattaaccttgtacttagactttgttaacttattcctcacaatgctccaaatttttggcggcggcagagattaagggtttgataacagtcgggatatgactgttatcaaacgtttcaaaagaacggtcatcaggtaaaactgatgggcgttctttttttatgcttgacacaatactatgcataatatagtattaactttcgaaagggtgatcggtttgaatccacaattaaagaaaggcctcttggaattttgtgtgttagcaacgcttaagaaagaggattcatatggctaccaaattatcaaagatacatcgagtgtcgttgaaatttcggactcaacattatacccaatcttgaaacggctcgaggcgcagggtgaaattgaaagttatcgggtcgaacataatggacgcttgcgtaaatatttccatttaacattggcgggacaagcatcgattgatagttttttggccgattggccggcagtgatgggcatttatacttacataagggagtgtaacaatgactaagaatcaatttattaaacagcttgcggcagaattaacgcggtatgggattagtgatgcagccaacacgattgattattacgatgaattaatcgatgatcgactggaagcgggtgaaacggaagcggagattatcgcgagtttagcaacgccagctcagattgtagcgcaattagctacaccagataaaccggttcgccaaaagaagatggcaccgatgttgattattttaatcagtatcttgttagttttagggtcaccgttatggggcacgttgttattgaccgccatcatattagtggcacttggttatttcttgatttggttaggcccgtttctgggggcaatctttgctgctgccggcattcttggtgggagtgtcagcttagttttatcgttctttgttggcttacaagaaggctggataattgcggtgatgcagcttggaattagttttgtgatggttggtgtggggctgatttgtgcaggggcgacctggtacatgacgaaatacttaattcgtttctcggttggaatcacacgctggctagttgggatgttccgtagtcgattaaaggtggtggcgtagatgttgaaaaattggttgaagattagtttatgtatgattcttgtgggaattattttaatgaccgttagttttgggatggcgggttttaaaagccaaccattccaatatcgtggcacacatgaatggagccggacgtttaacttttaagataaataaaaagaggtgccgatgatgataatcgacacctcttttgttcgttattgaccgttccatggataatcggtactgatattttgattgaaatgtttttgactttgaaaatttgcgagacggtgggcttttcgttcctcataaccggcacagatgaaccgttcttccggtgattcgggttgaatgttaggaagggccggacctttttccattgtgacaaaggttaagaaggcagttagcccgaggaatcgttcgccggtcttgagatgttcaccgataatcttagtaaagatttcaatggaacgggtgccgacaccggcaacgtaactttcgatgcacaaggaatcttgcattttgaatggttcaatgaagttcagttggtcgatgctggcggtgacggtttcgacgcgcgctaagcggctagctgaaatggacgccgaaccatccaagagttcaagcaagcgtccgccatagaccgtttcatgttcgttcaaatcattgacgaagacgcgatggttactgatggagagggtttgacgacaggtgatgagatttgacattataaaaagactccttattaatcatttagatgggggacaatcagttggctagcagccaagtcgacttggtaaacgaatgcttgctcttcacgaatcgtcattcccatatcagtcgcgtagactaatagaccgagttgatgtcccgctgttaaatcataatgggtgggttgtaggtcgagcgtgatatcatagaattcgtttggggtgacggcgtcggtttgataactattgtggcgattttggagattgatgtgtcctttagtgatgacttgataattgcttggtcgattgagcttaaattcctttaaatcatcatagcgccactgatagccgagttgttggcctttagcagctaatacagcaggtgtggtgcctaaacggttgaattgaccatagtcaataaccagcacgctcaatagcccacgttcggcattgacagcgacccttgttctaaactgaattcgaccatcaataatgagcggttcggtaagcggggagcctaagaaacgcaaccggttgccagtgaaacttgattgatctgcgattaaggcatcttgccaagcggctgtactgattttttgggctctaaaggccgcaacaccgtcatctttaaaagtcgtcagtggggcattttcggtagcattagtgcttaatgtttgttcgtttagccagaaagtcgtagttggattgtcgagggctagccaatccgcctgggtcgtccaagtggcttcttgtgcgttgtcttgaattgtaacagccggtaattttgtgacagcctgattctcaacgccgagtaattgatgcgtgaaccataagttcatcatatcggtgaaatcgatcgactgaatgttattcatatagatatgttcaccttggtgtaagaaaagcttcttattaaccggttgatcgcgcaataaatcccacaaggcgccggcattttgtagtttaacgttccaatcatttaatccgtggactaagatgacatcgcaattcaggttggcgagattgtcacgatagttacgggctgcccagaaggcgttgtaattgcctgtgatgcgatcttgaccttcttgcagggctttgagttggtcggcgaagaaagtgccagagagcgcatgatcagcggcatctttttggcgggtttggcacaacttcgctaagacatcggcatcttcaccctgacaatcaattggggcgaccactaagccattttcgcggtagtaatcgtaccaactggaaatggcggcttcagctacaatggttctcagaccttcaacgccagttgttgcagcagcagtggctaaagtaccaaggtaggatttaccagtcattgcaacttggtgattacaccaccaagctttaatttcaatgccatcggtgcggttggtgaaagctcgtcgattaccggctaaccactcgatgatagccgtggttgaagctgtttcttcaggtgagccacaagtccggacgccgtcggaaccgcgtgtgccaatgccgccagcgtaaacgttcgcaaatccgcgcgccagaaagtaatcatttaaactgtaattgctgtcatctgttgcgtttaattcagttgtcatacttgtgccattaacggcgcgaggttgaggaagcggtgcagtggttggcgtttgggttaaatcagctaagtttggttgttgaacgggtttagtcgcaattgtagtatcaacattgtgcaaatcagcatcgacgtcgttaatccccttatagtaaggactggcagtgtagagtgccggaatttttaagcccgcttcagtttcgcgtggtctgaagatagtcgtttctaataagtcgcgttggccgtcttgatcagtatctaggctcgattcaacataaacgacttctcgaattaaatggctggtatcgaaaacgggttgtaccttaccattgaagatgagaaattggggctgatcactttgccagtctgcaaaaaaaccacggttagccaattgatccagataaagtaacccagtttggctacgcgtcgttaataggagataaagggcttcgatgaaagcggtctgatcaaatgccgcttgatcgataaatgggagttttgtggcggtcataaaagcagtgggttgatcaagttcaaaatcggttgtcatttcaaaacccaagagttggagggcgacattatagaagacaacttgatcgaatgaagtatcaatggtttcaaggtaggcggttagatttaattcggttgtggcttgtaataaactaagttgcccgctctgggttgattgactatgtgcttctgggaacagccgttgaaaaatatcttgggcaaggacttggaaggggagctgggtgaaatcctttgggagtaaatgaatgcgctgtaattccgtgatttgttcagattgagatttagttaagcgtgcaaactgatttaattgcatgtttttccctcatttctgcgaattttaattgacagtgactacttcaattgcttataatatagcatgttatgcggtattctgacagcaaaaaccgtcaatcaatgaggtcatagtagctcagctggatagagcaacggtcttctaaaccgtaggtcgcgagttcgaatctcgcctgtgacattcaataattcttggagacatctaatttcgcacattgcttgcgaggttaggtgtttttttaatgatggagtgaatgtaaaatgcaagattatttaaaagcgcatcaaacatggttagttgatttttatcaacaacggaattggtatcgattttcaccattaattcggttgaacttcttgagtgaagaacttggggaattatcacgggccgttagaacgattgaacttgggcgtgatcacccaggtgaaaaagttaaaaacgacgctgaaaagcgagctaacttaaaagaggagttagccgattgcttcgatcaactgctcattatctgttcgaaatatgaaattgagcctgaggaattgatggcacttagcgaggcaaagtttacaaaacggttcgaaaatgattagaaattaaatatttaaataaaaagtttatgcgctttaaagcctattttaatagccttttgcgaatgaattgcgagcgatttagtcgatagttttgggatgcgggttgctaattagaaaatgccatgctatactgttcaagtaatcaaattttgaaacgtaatttgagttttggatgcacaataccttcctcttttacctatcaataatttattgcaacaaaaaacgtacattgatatgtatcaggaggaaattattatgaacaacggcacagtaaaatggtttaacgcagacaaaggttttggttttatcactggtgaagacggcaaagacgtatttgctcacttctcagctatccaaggtgacggttacaagtcattagacgaaggccaagcagtatcatttgatgttgaagacagcgaccgcggtcctcaagcaacaaacatcgttaaactttaatatttgtgccccgcatctgcggggtttttttatacaatcaattcaatcaaataagcaaggacctgagacaaaaactgtctcaggtccttttttagtttagtggaaaataatattctcatgttgccactaatgataagcgattttatagtctcaattactctgttaaatactgtaacaaatgcttttcggcattatcatagttgtattgccgagcattgagtaacaccaagttgcgatcattatcaaaaaaattaccggtgctctgcgttagatcgggatggagtgctaagtattttccaactggcacttcagtatgcagcaatgtttgggaataatgcggtagctcatcggtgacattccctgggaaaaatgaattgaccgtaatctctttttcagccagaagataactgagaaagagggttaataaagctttatgggttaataaccaccttgcacgttgtaaagtagtctcctgttcttcgcaaatgctgagttgttgaatgatttgcggatcaccggttatgataaggacgcgaccgccagttaatcggtctgctaagcccattgttagctgataatgggggactaaattagccttaatattttcttctgtgagctggggaaaacaccggcagtgtgcactagaacgtgtattttatccactttatatttgatgcttgccagtgcttggttgcgtcctgatttggtcgctaaatcggcttggataaaaaaggccgcttttccaagttgggccacagaagcccggccttttgccgcattctgtccgatgataatgacttgatggccttctgcaatgagatctttggcaatgcgatagccaatcccagatgttccaccggttatgacaatatccatatgtgacagtcctttctttttcaaattattatttaagttgattgatttagaaatgagtgcatgagatagctattaagtgctttcgttaattaacttagggtcagtatatattaggctttttagagataccaattctttaactcgaattcgtgcaccatcgacggtactatagctattaacgatatgtcttttgtttaggcagttaaattgtcaaggtcctattgggttcagtatgatgaacatatagttaggattcgcattcatttcattaataggagggtgttgctaaatgattacaacgtataagaaaattttagtcggggtcgatggatctgacttagcgaacaaggcatttatggaagctgttgaagttgcgaaaagaaatgatgctgagctttatgtggctcatattattccaagtacagtctatgtttcaccggatgctagtgtctatgccaagatgacggcgatggaaaaagatcgtgtgaaggagcaactagcggctaatattcgttacgcgaataatcatgggctaacgaaggtcaccccgattctggaagtcggctcaccgaaaaaagaaattgcgattcgcattcctgaagaatatgggattgatttaatcatgttggggattacggggaaaggggttattgaacgaatgatgatgggatcggttgcccaatatgttagtgcccatgctgcaacgaatgttttattagttaaataagaacgtctggttccaaaaaagcggtcacgacattttttgtcgcgaccgcttttttgcgtgtggttagatgacaataatgtcactgttcaaatccaaaagcgtattgtacattaatattgtaataaattaatggatagattagaaatttcggagggacagttgatgtcaaaaaaagggcgtcaaattggtggtgtcattggtattctggtcatattcggtctggtagcgggcggaattgtggttcagcgacaacatcaccaacgagaagtaaaaatcgcgcaacaacaagccaagattaagcgacaacgacaagcgcaagaagcaaagaaacagcgcgaatcacaaaaagtcgctgctgctaaagcaaaggaagaacgacttaaagcagaaagccaaccgacaattgttgcagaacaagcgttagatgactacttaaagcaaattggcttttcaggtaccgcgttaattgtccgcgataagcaagttttgttggataaggggtacggcagtgctaatcgggccaagcagttggtgaatacgccagatacgctatatgcgattggttcaactgaaaaagcgttgattgcaacgagtttattgcagttacaagaacaaggaaagctaaacgtcaacgatccaatcagtcggtacctcccggactttccgaatgggcagcagattaaactgactgattttttacatcatacatcaggcattgtcggtcgggaccaagataatcagacgaagactctcgaccaattaatcgaagaaattattaaaaatgggattaaggaacaaccgggcaagtggcactatatggatgcgaactatattgtgctgacgaaggttttggaaaaagtgagtcatcaagattacaaaacgtatctaaaagaaaaaattctaaaaccaagtaaaatggcgcacactggtttcatgacggatcaatattcgcgattaccagcggcttccattggctatctggcaaatggcgctgcgggacaactccccaatttcacgcaactaccaggggtcggagatatgtatatgacggcgactgatatgtaccgttttgaccgcgcgttgtggactggaaaattaattaatgaacagagtaaggctcaaatgttccaaccagggagtacgtcccactatggaatgggcttttacaatgatccagcactcattgttaatcgtggttatttgtcaggctggaatgtgtcgaacggatttagccacggtggccgaatctatatcgtgttattttcaaacgaaaagaacgaaaaggtttcgctcagcaagatgaacggtgaattatatactaaaataactgcaacgatttaagtaaaaaaacgggtttaatgattcagatgaaggactttaattagtgttgatctgagattattgacccgttttttaattttggatgtgctacaaatgccgaattggtaaggatgttaaattgtgtaaaatttaattttggtaaaacgctttctttttggacatcggtaatctataatagttttcgaggaaacgttttcctaacattgttgttaaaggaggattaagatgactgaaaaatacattttggcgattgatgagggaacaaccagtactcgttcaatcatttttgatcacaatggtcaaaaagtcgccgatgcacagcgtgaattcccccagtacttccccgaaccgggctgggtagaacataatgcaaacgaaatttggaacgctgttttatcgacgattgcaaacgcttttatatcatcggggattcaaccccatcaaatcgcggggattgggattactaatcaacgtgaaacaactattatttgggataaggaaactggtttaccaatttataatgcggttgtttggcaatcaagacaaacaaatgacattgccgaacaattgaagaaagatgggcatgaagaattattccatcaaaagacggggctattaattgatgcttacttctcagcgactaagattcgttggattttggatcaagtgccaggtgcacaagaacgagccgaaaagggcgaactcctctttggaaccatcgatacttggattacatggaagttaacaggtggcgcttcacacgttaccgactatacaaatgcaagtcggacaatgttgtttaacattcacgatttggattgggacgacgaaatcctcaagattttaaacattccacgggccatgttacctgatgttcggtcaaactctgaaatttatggtgaaacagcaccttatcatttctatggtagcacggtaccaatttcagggatggcaggggatcaacaagccgcattatttggtcaattagctctccaaccagggatggttaagaacacctatgggacaggttcatttattgtgatgaatactggcgaaaaaccaacaatgtcagaaaacaacttgctaacgacaattggttattcaatcaatggtaaagtcaactatgcacttgaaggctcagtcttcgttgctggttcagccattcaatggttgcgtgatagtatgcaactggttgaaaaatcatcagattcagaagcagccgctaaggcttcaaccagtttaaatgaagtttatgttgtgcctgcctttacaggtttgggtgcaccatactgggactcagaagcacgtggttcaattctagggattacgcgtgggacgaaccgacaagacgttattaaggcaacactgcaatcattagcttatcaaactcgggatgtcgttcaaaccatgcaaaaagatactggcattgatatcaaagtgctccgcgttgatggtggtgctgcaaacaacaactatttaatgcaattccaagcagatattttgaatagctcgattgaaaaggcagctaatttagaaacaactgcaatgggggctgcatttttggctggtttagcagttggtttctggcaagatacagacgaattggcgcatattttctcagttgggcaacgtttcgaaccagaaatgcctgaagaagaacgggaagatctctatgctggttggcaacaagcagttgaagcaacaaaggttttcaaacatcgaccatataaaatgcgtgaatgaggaggattataatgacattttcattagaaggacgtcaacaagtaattaataacttaaagaacgaacaacttgatttattagtaatcggtggcgggatcactggtgctggggttgctattcaagcggctgcatcaggcatcaaaaccggtttgattgaaatgcaagattttgctgaggggacttcatcacgttcaacgaagttagttcacggtggtatccgttatttaaagactttcgacgttggggttgttgcagatactgttagtgaacgggccgttgttcaagggattgcacctcacatcccacggcctacaccaatgcttttaccaatctatgatgaacctgaagcaacttacgacatgttcagtgtcaagattgccatggatttatacgataaattggcaggggtaactggtacacaatatgccaactatacaattgatcgtaaagaagtactccaacgcgaacctggcttgaagtcagaccgtttgatgggtgctggtgtttatttagatttcgtcaataatgatgcgcgcttagtcatcgaaaatattaaagaagctgacgaattaggtgcatcaatcgcaagtcacgttaaagcagtcggaatgacttatgatgcaaacggtcgcgtaaacggtttgaaagcacacgatgaattaacggatgaaacattcgatattcatgccaaattagtcattaatactgctggcccttgggtggataaagtaaatgctttaaacacggaagtcaaagcacaagaaacacttcgtcctactaaagggattcatttagttgttgatagtagtcgtttatcagtgccacaaccaacttacttcgattcaggcttacatgatggtcggatgattttcgttgtgccacgcgaaggtaagacgtacttcgggacaactgatactgattacacaggcgatttcaaacacccacgtgttgaacaagcagacgttgattacctcttaaaagcaatcaacaatcgctatcctagcgttaatatcgctttaaacgatattgaagctagctgggcaggtttacgaccattaatttctaataacggtagctccgattataacggtggtggcgctaatagcggtaaggtttcagaagaatcattcaacaacttaatcaagacagttgatgattacgaaaacaaaacagctgctcgtgcagatgttgaaaaagcaatcagtcaattaagaacggcgcatgctgaagaatcagtcaacccatcacaagtttctcgtggtagtgatttgaaagtggctgaaaacggcttaatcactttatcaggtggtaagattactgattatcgtaagatggcagccggtgcgcttgaattaatccgggatatcttgaagaaagatttcaatgaaacagttcgtgaaatcgattctaagaaattacaagtttcaggtgggcacttcgatccaaataacgtggatgatacccttaaattctatgcaaaagttgcgatgaacaaagggattgatgaagaagatgcgattgatttagcaaaccgcttcggttcaaacgtcagccgggttgtttcatacgcggaccaaggtgctgctgaaggcttgaacttgaaagaaacaatcagcttaagatactcagttaacgaagaaatgacattaacaccagttgattatcttttaagacggacaaacttcatcttattccacaatgatcaattagcagccatcaaacaaccagttgttgatgaaatggcgcgtttattgaactgggatgacgctgaaaaagcacgtcaaacagaattattggattcagcaattgctgaagcacaattagactatttaaaataggacttaacttggaggaaatctcatggaacattcaataatggttcaggcgcttggtgaacttgttgggacgtttatccttgttcttttaggggatggcgttgtagcgggcgttagcttagcaaaaacaaaagccaacggtgctggctgggttgctatcacgcttggttggggctttgcggttactttaggggtatatacctctgcatttatgggacctgcacacttgaacccagcggtgacgattgcttttgcaatgattggcaagaccccttgggcagcggtggtaccattcattatcgcccaaatgattggggcgttcttaggcgcagttgtcgtttggattcaatactatccacattggcaagctactaaagatcaagcagcaatcttaggcacttttgcaactggccctgcgattcgcagcccatttgccaatttaatgagtgaattgattgggacattcgtcttaatcttcgctttactagcattaacacgtggtgaattaacagccggtttgaacccattagtggttggggtggttatcacagcaatcggtctatcacttggtgggacgactggttacgcgattaacccggctcgagatttaggcccacggattgcccatgcagtcttgccgattgccaacaagggtgattcagactggtcatacagctggatcccagttgtcggtccaatcatcggtgggattttaggtgcattactcttcgttgtattgccataacgataaaaaaacgattaaccaacaggttaatcgttttttttgtgtatttatgatttaaatacgaattattaaatatatttatgtaaaatagttcgtaaaatgttttgacatatcagatgaagattgttagaatcaaagcataatcaacaacgagaaagtgggcaaagaatatgagtgatgtggcacttgttatgggctctatatcagattggggaacaatggaacagaccgcttctgtattatcggagttgggcgtgagttatacgaaacagattatttctgctcatcggatgccggatgaaatgttcgccttttcaaaagaagcacaggcgaacgggtatcgtgcgattattgctggtgcgggtggtgccgcacatttgccggggatgattgctgccaatacagtcttaccagtcattggcgtgccaattcaaagtaaggcacttagtgggctggattctttattatcaattgtgcaaatgccaggtggcgtaccagtggcgacggttgcgattggtaaagcgggggccgttaacgctggtattttagcgacacagatttgtggcttgcaggtcccagcttatcaagtggcactgcaacagtatcaagcacggatgcatgcaaaggcggtggcaagtaatgcagactttgactaaccaaattttaccagggcaaacgattgggattgttgggggcggtcagttaggtcagatgatgacattagcggctaaagagatggggtttgcagtgattatcttagatccgcaggcagactgtccagccggacaagtcgcggatgatcaaattgtggcagcttatgatgatcaggcacaaattatgatgttagcgcaacgtgtcgatgtgttgacatatgaatttgaaaacgtcgatgctaagacgattgaagctgcccgagaatatacatggattcctcaagggacgaaggcgctacggattgctcaagaccgattgttggagaaacaatttcttgttgaccaacagctaccacatgccacctttgagattgtaacgacccctgcagaattaataccagctgttaaaaaagttggttttccttgtatcttgaagaccacgcgcggtggatatgatggtaaaggacaagtcattctacggtccgcaatggatatggaggtggctcaacagttgttaaccgctagtgtttgtgtattagaagcgatggtccattttgatcaagaaatttcggtcataattagtcagaattcagccgggcaacaagccgtttttcccgcaatcgagaatcaacaccgagataacattttacatatcagcatctgcccggcgcgcatttcagcggcgttagcggcacaagcggaatcggttgcggcaaaaattgccacgcagattgaattagtcggcacgttaggtgtcgagttttttgtcggccatgacgggcaactctacgttaatgagattgcaccgcggccgcataattcaggtcatctaacgattgaagcgtgtgacttttctcaatttgcaacccacattcggggcgtctgcaactggccactccaaataccacaattgtggcaatcagcggtaatggtcaatattcttgggcagcactggcaagcagcgctaacagccagtcggcagtcagcagattggcattatcacgactatggcaaagtggttcaaaaggtcaaccgcaagatgggccacgtcacgttattaacgccggctgttgatgaaacgttaacggcaattaaaaagactaaaatttgggactagaggggacgctaataaatgattgaacggtatacaaatcctgaaatgggtgcgatttggacggaccagaataaatatgaggcatggctggcagttgaaattttagcggatgaggcttggtcagaactcggacacattccggctgaagatgttgcgaaaattcgtgccaatgcgatgttctcaattccacggatcttagaaatcgaacaggaaacgcggcacgatgttgtcgccttcaccagagcagtttctgaatcacttggagatgaacgcaagtgggtccactatggtttaacatcgaccgatgtggtggatacggcgtatggttatttgttgaaacaagccaacaccattttgcgggccgatatcgatgcgctattggcggtgattgccaaacaagccaaacgttaccaagatacggtcatgatgggccggacgcatggtgttcacgctgaaccaacgacgtttgggttgaagctagcactatggtattcggaattaaaacgacataaggcacattttgaagaagctgcaaaaggcgttgaagccggtaaaattagtggggcggtgggcacgtttgccaatattccaccgtttgtcgaagcctatgtgtgcgaccatttaggaattcgcgcccaagaaatctcaacacaagtcttaccacgggacttgcatgctgcctacgtggctgaaatggcgttactagcaacttcaatcgagaagtttgcgactgaaattcggggtctccaaaaatctgaaacccgcgaggtcgaagaatttttcgcgaaaggccaaaaaggctcatcagcaatgccccataaacggaatccgattggttctgaaaatattacgggcttggcacgcgtgattcgcggacacatggtaacggcgtatgaagacgttgcactctggcatgaacgtgatatttcgcatagttctgccgaacgcatcatcttaccggatactacgattttgttggattatatgcttcgacggttcaccaaaattatgacggacttgacagtcttcccagaaaatatgaagcgtaatatggggcggactttcgggttgatttacagccaacgggttcttttgaagttaatcgatcatgggctttcgagagaagcggcttatgacttgattcaacctaaaacggcccaagcttgggatcaacaaactgatttcagaccgttattagaagcggatgaccggattatgaatgtgttgacgcccgctgatttagacgacgcgtttgattaccattaccatattcgccgcgtcgcagaaatctttgaccgcgttggtttgggcgaataatgatgaaaactttgaaatgaggttatttcaaagtttttttacaccctaatgtaacacgaacgattattttaattttaaataaaatatatgttatttggagggattcaagcatgagtgagacgttgttttattctggaaaagcgaaagatgtttttacaactgacgatcaaaatgtgttgagaatggtctataaggaccaagcaacggcgttaaatggcaaacgcaaggaacagattacgggaaaaggattattgaattatcagatttcgaaattaattttcaaatacttgatggcaaatggtattgaaacgcatttaatcgagaatatttcagcaactgaacagctcgtcaagaaagtgacgattgtgcccctagaagtagtattgcgcaacgtggtggcagggagttttgcccgcaagtttggtcaagcaccgggtaaacgattggccacgccgattatcgaatactattacaaaaatgatgcactagatgatccagccatcaatatttcgcaagccaccgcgcttggaattgtgacaccggcggaaattgaagtgattgaaaaacaaactaagcagatcaaccagctgctaatcgatttattcgaccgtgcggatatcgatttaatcgactttaagttggaatttggccggtatgacggtcgcttgattttggcggatgaattttccccagataactgccgtctgtgggatcaaacgacgcatgaatcgctagataaggatgttttccgcttgaacaaaggggatttagtatcggtgtacgatgtcgtattacgacgattagaaaaaattttagggggttctacagatgtttaatgtgcgtgtgcaagtgacttataaagattcggtgctagatccacaaggccaggctgtccaaaaagctatcgaacgacttggctttgatggtgtgagcggcatgcgcattggcaagtcctttgaaatgcaagtggctggcgatgaccaagccgcagttgaaaaaaaggtcgcacaaatctgtgatcaactcttagccaatcctaatatggaacaataccactacgacatacaaaaggtggcgacgaatcaatgaaatttgccgtattagttttcccaggttccaattgtgacgctgatttatatcatgcaattgaagatgtttgtcatgaaaacgctgagtatgtcccgtacacagcaactagcttggcaggttttgatgccgtattagtgcccgggggcttttcatacggcgattatttacgcagtggtgcgattgccaagttggcaccgattatgacggcagttaaggcgtttgcggctgctggcaaaccggttatcggtatttgcaacgggttccaaattttaacggaactcgggttattaccaggcgttcttttgccgaatcgacaaacccattttatctgtgacacagtcgcgttgaacgtgaccaatgccggtacgatgttcacccaacactatatgccgaacgaacaaattcggttgccgattgctcatggtgaagggaattattattgcgatgcagagaccctggaacggttaaaagtgaaccaccaaattgcatttacttatcaaaatgatgtgaatggtagtttagcgaatattgcgggcgttacgaatgaagccggcaatgtcttagggatgatgccccatccagaacgcgcagtcgaaaccttattaggtagcgatgatgggcaacgtttatttgcagcattaatcacatcgattcgaaaaggagggcaataaccgtgttaaagcaaccaacaccggcagaaatccaagccaccaagctttatcagcaatgggggttatcagatgatgaatatgaattgattcgtactaaaattctaaaacggttgccgaattatacggagaccgggttattttcagtgatgtggagtgaacattgctcatataaaaattcgaagccggttttgaaaaaatttccaacaagtggtcagcacgtgttgcaaggcccaggtgaaggcgctgggattttggatattggcgatggtcaagcagtggtctttaaagctgaaagccataaccatccctcagcagtcgaaccctatgaaggggcggccaccggtgtcggcggtattattcgggatattttttcgatgggcgcgacgccgattgcgcttttgaacagtctgcgctttggtgaattgacggatgaccacacgaaataccttgttcaagaagttgtggctggaatcggcgggtacggtaattgtatcgggattccaacggtcggtggtgaaatcggatttgatccatgttatcagactaatccactcgtcaacgcaatgtgcgttggtgtcatcgaccaaaaggatattcagcaaggtaaagcgcgtggtgctggcaatagtgtgttctacgtcggggctaaaaccggccgcgatgggattcacggggccacttttgcatcggatgaatttgcagatggcaaggcgacccaacgctcagcagtccaagtgggtgatccgtttatggaaaaactattaatggatgcttgtttggaattaattttgaagcatccagattggctagtcggcatccaggatatgggtgcggcgggcttagtttcttcaacagcggaaatggctgaaaaggcaggtactgggatgattctcaatcttgatcttgtgccacaacgagaaacagagatgtccgcttatgaaatcatgctttctgaatcgcaagaacggatggcgctttgtgttaaagctggtcatgaaacagatgtggttgccttgtttgaacgatatgatctggatgcggtccggattggtgaagtgactgagagtcaacaatatcaattgtggcatggtgggcaattagtggccgatttgccagtggcggctttaacgagtgatgcgccgatttatcataaagcacaaactgaaccagcacgcatcgctgaatttaaagcgatggcgccttatcagtcggtgattaatgatgttaaacgaacatggctcgatttattgggccaatccacgattgctgacaaacgctcgctatacagccactatgatgcacaagtgaagaccaataccgtcgttttaccaggaagcgatgcggcggtcgtccgaattcgtgggactaaaaaagcgctcgcgatgacgacggattgtaacgggcgttacttatacctcgatccaaaagtcggtgggcaagtggcagttgccgaagcagcacggaatatcgttgcggcagggggccaaccactgggaattacggattgtttgaactatggcaatccggaaaagccagaggtattctgggaatttgatcaaagtgcccaagggattgcggcggcctgcgaggttttcgatacgccggtcatctctggtaatgtttctttttataacgaattcaatggcgaagcgatttatccaacaccgatgattgggatggtcggtttgattcgagatacagccgacatcacgacgcaagattttaagtcagcgggggatttaatctacctcgttggccagacggatacgaatttagcgggttcggaactccaaaatatgttgacgggcaaagttgcaggacgattaagcggcttttcgttagccactgaaaaagcgagtcaagattgcgtcttagcagcgattcaaaagggctgggtgactagcgcacatgatttatcagagggtggttttgcggttgcgttagccgaaatgacttttaaagaacaactcggctgccgcgtgcaagtcccccttaatcaacaacagttatttgttgaaacgcaatcccgctttatcatcacggttcggccagaaaatcagacggcgtttgaagcgttctgtcaagatcaggcgcaattaattgggacggtctcggccacgccaattatgcaagtgcaaacgactgaatcaactgttgagttatcggtgactgaagcgaagttaagttggaagacggcgataccatgtcaaatgaaataaaaagtttaaatgaagaatgtggtgtttttgggatttggggtagtccagaagcaaaccaaatgacttattttggcttgcatagtttgcaacatcgtgggcaagaaggtgccggcattgtcactaatgatcacgggcacttaatgggttatcgcaatcgcggtttgttggcggatgttttccgcaaaccggagcacttaacccaactaaccggggacgcggcaatcggtcatgtccgttatgcgaccgctggtagtcacggtttagaaaatattcagccgttcctattcgattttgcaaccgatcaattcgcacttgcacacaatggtaatttaaccaacgcggtcacactgcgccgcatgcttgaacaatcgggggccatcttaaaatcgagctctgattctgaaattctgatgcatctgattcgacgtgcagaagggcctgatttgcacgcgcaaattaagacggcccttcaacaaattcgtgggggctttgcctacctattattaacgcaagattcattgattgcgatgcttgatcccaacggctttcgaccactctcgattggacgtttagcaaacgggggctacgttgtggccagtgaaacctgtgcgctcaataccgttcaagcaacttttatccgagatgtgcagccaggcgaaattgtgacgattgatgcggacgggttacattctgacttcttcacaaccgaaaccacgcattcaatctgttcaatggaatatatctactttgctcgcccggattctgatatctgtgggattaacgtccatgcggcccgcaaacgaatggggaaacagttagcacgcgaaaccgcagttgatgcggatatggtaattggggtgccgaattcatcgttatcggccgctagtggctatgccgaggaaagtggtttgccgtatgaaatgggcctcgttaaaaatcaatacgtggggcggacgttcattgaaccaacgcaagcccttcgtgaacaaggggtaaaccgcaaactcgccgtggttaaaagtgttgtggctggtaaacgaatcgttttagtggatgactcgattgtgcgtgggacgaccagcaagcacatcgtgaaacgtttgaaagaagcgggcgcattatccgtgcatttgcggattgcgtccccaccattgaagtacccttgtttttatgggattgatattcaaacacgtgatgaactgattgccgcgcatcaaagtattgctgagatgtgtgccacgattggcgcggattcacttggctttttgagtgaacagggattaatcgacgcgattgggttacagcaagatgcgccgtattccggattatgtatggcgtatttcaacggcgactatccaacgccactttatgactatgaagctgcctatcaggcaagtttaaaagcagataaggagcaacaatcatgacaaatgcttaccaaaaagccggggtggatgtgacagccggttacgaagtggttcgtcggattcaaaagcaagtcggcgcaaccaatcaaaatattggtcgcttcggtggtcagtttgccttagcgatggggcagtatgaaaatccggtgctcgtttcaagtaccgatggggtcgggaccaagttgatggttgcttttgcagctgatgcacacgcgaccatcgggattgattgtgtcgcgatgtgtgtcaatgacattgttgcccaaggcgctaagccactttatttcttagattacttagcggctggtcaaacgcagccggataagatcgaacaaattgtcagcggcgttgttgcaggctgccaagctgctgacatgctgttaatcggtggtgaaacggccgagatgccgggtatgtatgctgaaaaacattatgatttagcgggttttgcagtcggaattgctgatcaagctcaattaattactggtgaaacgattcaaacaggggatgtattaatcggaatcgcgtccagtgggattcattcgaatggctactcacttgtgcgccaaattttcttcgaacaacatgggttgtccgtcgacagtcacttacccgaattgcctggtcagacactcggtgaatggctattaacaccaacgcggatttatacacaagcatgtcagccgtttatcgaacaaggttttattaagggcgcggcccacattactggtggaggctttattgaaaatataccgcggatgttgcctgacaacgtgatggccgaaattcaattgggaacatggccaagcttaccgatttttgcggcacttaaacaatatgggcaattggatgcactcgagatgtataacatttttaacatggggatcgggatggtcttagccgtcgcaccagaaaaagcggcacaagtcctcgcccaattgaacgctgaacaagaacaggcttaccgaattgggtcggttaaaccgcgacaagaaaatgcaatagaattggtgggttgatgagatgaaagtggcgatttttgcttctggaacgggttctaactttgaagtacttgcagatgatgacgccttaaaaaaagcgggcatggagattatgaatttagtgtgtgaccagccgggcgcaccggtgattgaaaaagcgcgccaacgaaatgtaccggtgacggtcatccgcttaagtgattatgatgatcgacaacactatgaagcagcaattgtcgcgctgttggcaccgttacagttggattatatattgctagcgggttatatgcgggtgattaccccagtattgttgcatacctacccacaacggattatcaatattcatccgtcgttactaccggccttttctgggttacgaagtattgaacgggcctatgcggcacaagtggctgaaacgggcgttacgattcactacatcgatgaaggtgtcgatagcggtccgatgattgtccaagcaaaagtaccattgttgcctggcgatagtttagccgcattggaacaacgcgtgcacgatacagagcacgcgatttatccgcaagttgttgctgaattaattaaaaaccaaaatagaaggagtaattcaatcaatgaaaagagcgttggtcagtgtttcagataaaacaggaattattgaatttgctaaaggattagtagcagctggttacgaggtgatctcaacaggcgggacattcaaggtattacaagaagcgcaagtaccagtaattgcgattgatgaagtcactcatttcccagaaatgttggatggacgggttaaaacacttcatcccaatattcatggtggcttgcttgccaaacgcgacgaaccaacacacatggccgctttagcagcccatgacatccagacaatcgatttagtttgtgtcaatctgtatccttttaaagaaacaattcaaaaaccagggattactgaagcgcaagctgtagaacaaattgatattggcggaccttcaatgttgcgttctgccgctaaaaacttcaaatcagtgtacgtggtcgttgatcaacaagattacgcgcaagtcctcgaacacgtcgtcgatgaggggcaagctgcagttgattaccgtcgttatttagcagccaaggcattccgccacacggcagcttatgatagcttaattgccggttatttaaccgaagcagtcggcatcgaattccctgaaaaattaacacgttcatacgactttaaacaagcgttgcgctatggggaaaatgcccatcaaaaagcagcgttctatcaaagcagtttaccaacggctttctcgattgcctcagcggtacaattacacgggaaagaattatcgtataacaacattaaagatgcggatgcggcggttaaagtggtcgcagaattcagcgaaccttgtgtggttgcgatgaaacatatgaatccgtgtggcgtcggcttgggtgcaaccatctatgaagcttggcaaaaagcctacgcggccgatccagtatcgattttcggggggatcattgccttgaatcgtgaagtggatgttcaaacagccgaagaattacacagtttattcttagaaattatcatcgcaccaagctacaccccagaagcgttagccattttagaaaagaagaagaatttacgcgtcatgacgcttgattttgaggctgctaagcaagcggatcgcttcgaaatggtttctgttttaggcggcttactcgtgcaagaacgtgatcgggtgactgatcaagcatctgaattgaaggttgtgacggacaaaacaccaacggctgatgaacaagctgcgatgttatttgcccaacgtgtggttaaacacgttaagagtaatgccatcgtggtcgcaacaaaggaccaaaccctcggcattggtgcggggcaaatgaatcgggtgggctctgtgaagattgcaatcgaacaagcggaagccaatggattaaaagcaccgttcgtcttagcatctgacgcctttttcccaatggatgacagcgttgaatacgccgcagaacatggtgtgacagctgttattcaacctggtggttcgattaaggatcaagattcaatcgacatggccaaccaaaaaggaatcagtatggtgacgactggtcgccgtcatttcaaacactagccaataggaggcaaatcatggatctattagtaatcggtagcggcgcgcgtgaacacacgattgcgcgtgcgctacagcagagttcaactgttgcaacggtctattgtttgccgggcaatccggggatgcaattggatgggattcaaacagttgcgattgagatgactgactttgcagcgatgattgcctttgcgcaggccaaaaaggtcgcctatacgattgttgggcctgaacaaccgttagtggctggcgtagtggatgcttttcaagacgctggattagcgatctttggaccgcgtaaagcagctgcggcattggaagggtctaaaactttcgccaaagaaattatggcggccgcgcatgtgccaacggcggcttatcaagcctatcagactgtccaagcggcactggatgccctcgatgacgttcgttatcccgttgtgattaaagcggatggtttagcggctggcaagggcgtcgtcatcgctcaaaatgacgtgagcgcgcggcaaactgttcaggcgttctttgaacagggcgtgccccagttattgatagaagattatctcgaaggtgaagagttctcgctgatggcgttggtggcgaataatcgcgtctatccattaccggttgctcaagatcataagcgcgcctttgacggggatcgtgggcctaatacaggtgggatgggcgcttattgtccagtaccccagattagtgaccaatgcgttgcagaagcggtaacgactattttagaaccgattgtggcaacgatggctgaacgtcaaacgccttttaccggtgtcttgtatgcgggcttaattgccacacaacacggggtgaaagtgattgagtttaatgtgcgctttggtgatcctgaaacacaagtggtgctaccacggatgacgggcgactgggcccaagtttttgcacaattattgaagggggaaaccccaacgttacagtggcaattatcaggcattacgttaggtgttgtggtggcttcagatggttacccgacacaatcgacaacgccgtttgttttacccactttgcaacaatttgcaaaacgcaacagcacatttagtttcgctagtgtcgcagaacaagccaatcaattggtcagcgctggcgggcgtttgtataccgctagttattctgctgagacgctaggccgagctagtcaacaggtctatcgggatttagcgcaactcgctttaccgacgactttttaccggcaagacattggatttcgaacgcaagtgaaataaccgagtataaatgtttgcttacttttgataagagaaccatgataaaggtattcaattattgaaagaaggaatctatcatgggatatcatacaagtgaagcggaaaatccaatcgatattttaaacttagcgtcgttagaaggacgcgtgaaagaacgaatggaagctggcgcgtttggctatatccgtggcggtgctgaagacgaatggacgatggctgaaaataccagtgctttcaatactaaaaaaataatgccccgtgtgttaaaaggcatcgatcatgctgatttacatactaaattatgggatattgatttaaaaacgccgattattcaagccccctcagcagcccaagggttagcacatgaaaaaggggaagtcgacactgctaaaggggtcgcagcggctggttcgattttctcaattagtacctatgccaatacattggtggaagatgcagccgcagcggctcctgatgcccccccaatttttccaactctatatgagtaaagatgatcaattcaatgagttcttattgaaaaaagccgttaaggcaggtgtgaaagccattattctcaccgtcgattcaacattgggtggttatcgtgaagcggacatcgagacgcaattccaattcccactaccaatgcctaatttagcagcttatagtaattctgacggtgctgggaagggcatctctgaaatttatgctgccgctaaacaaggattagtaccagaagatattcaaaagattaaacaaatcacaaatttgccagtctttgttaaaggcattcaatcaccagtggatgctgaaattgccattcaagctggtgcagatggcatctgggtttcaaatcacggtgggcgtcaattagatggcggacctgcttcgtttgaagtgttgcctttaattgcgcaacaagttgctaaacgcgtcccaatcgtttttgatagtggtattcgccgtggtgaacatgtctttaaagcactcgcaagtggggctgatttagtggccattggtcggccaattatttatggtttaaatttaggtggcgcccaaggggtacaatctgtttttgaacacttaaaccatgaattatcgattaccatgcagttggctggtaccaagacaattgatgaagtgaaagaaacaaccttacttgattaatatggtatactgagagtccttggcaggggcgctaaaaaaagcggttcaactcaatgatgagttggaccgatttttgacgttaacctaattcctgaattattcatacttttcgttgcagttaaaactttgtgcaaagttactttagtgtgtaaaaaaagcagctttttgttagttttgttgtcggactgtttaaaaaaggacagacttcaccctttccctaagaaaaacattttttattttgtgagttcacagcggatatatttttagattttgaatcttgaacagtgtctgccaaaataatttatcgaacacattggtctgagataaatggacccagacttgacgcgcatggtgcgtgaccttagctgccacatggagtaatttaaaacggatcgtcccgacctgagcgtgtttaagctttgttggtaaaactaagttcttcatggcttgcagtatattataagcgaccccagctaccagcatccggaactcattggcctcaaaactagaactgtccgttttatcaaagtgaaagccacgtttaacttctttgatcaagtcttccatggaaccgcgttggtgatagagggcaaagacttgtggaccgcttaattcttccaagttggtcacgataaactcatggtcaaacagaaagttgcccgccggccgcgttgatttaataatcacacgataaggtcgtgaccaactttgaggacaatagtctcgcaggacatgccattggacttcagcttcggtgaagtcctggtcacccacttggatcaggttttcagcccgactttggagctggtagttcgcttttaaacgaatcacgaacttagcctgctttttatcacacgcatggtagatccctggagctgcgaaaccagaatctccccgcactaagacatccagggaagatccgtcataggcccgtaagctccgtaataaaaatttagtcgcaccttgggaagtatagcgattgccggggcgtaattgagcattcaacaagcagcccgataaagcatcaaaggctagtaaaggatgataaccgttggtctggtagtgaccgttataagcactcttttcttggtcaccaaacgtatcggcatgtgtcgaatctagatcaaggatcagctgatgttgatttagctgcccaagaacaaagtgagctaccgagccgagcaatgatttgactgaaaagagcccagacgctgaaatgtgattgataaagcgtgaaagtgtcggctgggaagcgaccgcttgagacaagaccagcttaaaatcaacggcgtgtgacaaggtattagccgactgatcttggcagtatcctgccagcaattgcaacagcaactgcttaaataaattgttcaagggaaaggtacaatatttacggtcatctttaaaatgcaagttatcttctaagagctggtcaaagtgaatttggtgcagaaattcagcaattaataaagttccggcatcgttcgctaactcaccaccgtcattagaaatgttgatctggtcattgaataaaagtttttcatgatgtaaagttgacataaggagcactcctgttctttgtggttttcatcgattttacaatagcacaggatgtgctctttttgtacacccaacaggtgaaaaacgaaaaagatgcgaactagcatgacaacaacaaaaagtagtccttaagggaaaagtatgaataattcaggtaattatttaagatgggggagttcagctaataataattcgctagcgactaatccgagtaggctgacaataacgtatacccagtgagaaccactaccccagctgaatagataagcatcaacaccaactaaaatgataaagagcacgcaatttgtgattaagccaattttgaaagtcaattgactagcaataacggcgaataaaacgattgaaatgaaaataatgaagaatgcagaaatcaaagtgacgaccacctaacgctatccgatttgaaatactacgctcattttactataaccgcagacgaacaacaattaaatttgtgggagataaagtttactttttgggtgttcgttaacagaatcttcaaatttacagtgtacactaggggatattcaactgatcaagggccgttatcaagccgattaatggacagacttttcactgagcggctatactattgacaggtgaatttaattaaaagattgggggaactatcagatggttcgtgagacagatttacgagcacaagatccacgtgttcaacgaacaaagcaacaattacgtcaagccctcattatcttgctgaaagacagtacaccaaaggggatttcgattcaagcaatcaccaagcaagcggcaattactcgcgggaccttttatctccattatgaagataaagtggatttcatccgaaccgcggtggccgatttggtggccgatttttatcagcaagtgactgtagtggtcgatcagacatatcgtcaggtcagtttacaggcactttttgaatatgttgaacaacaacaagctgcttttaaagtgttctataaaaatgaggcgacgcttcactttcaggcacaactgactgaatcaatgcgccaattaatgcaggattacgtggctaaacgctataatcagacttcacaggctgatcaaattgagatgagtattacgattgattatttagcggtggccagtttagcgttggtctttaagtgggtcaatgacgggcttgtgtattcaccacgctacatggctaagatgttataccaattggtacaaacacctaatacgacgtttgatgtcgcacaattttttgtcgaggcgtaataaagcattgactcgccctgtgatattcgatataatatgaacgttgtaattgtgagctccacagctgcaaccgcgcatactaaggcattaagtactatgattagtcaccttagttggcgagtctaagaaaaaataggaggtgcacacatgtacgcaattatcaaaacaggtggcaaacaatataaggtagaagctggtcaagcaatctacgttgaaaagttagccgcagaagctggcgaaaaagtaacttttgatcaagttattttagttggtggtgaaacaactaaggttggtacaccaaacattgatggtgttactgttgatggtactgttgaaaaacaagggcgcgaaaagaaagttgttactttcaaatacaaacctaagaaacacagtcatcaaaagaagggtcatcgtcaaccatatactaaagtgatgatcgacgctatcaacgcctaattgagggaaataagatgattcaagctgactttacggtcaatgccgattcgcaaattatttcttttcaaattacgggtcatgccgactcgggtccttacgggagtgatatcgtctgtgcagctgtttctgctgtctcaatcgggacaatcaacagtttgcaaaagcttgctggttttgaaccagaggtagaagcagataacctgaatggtggtttgttaacttgtcagattccggcaacggtttcgggccaagctttagcgacagctcagattctcttgcagaatttgcagttgacgcttgaagatattacgcaacaatacgggcagtacattcaagtacaaacaaaacgtaaatagacagttaataaacaggaggtgcatttagatgttacaaatgaatttacaattcttctctcaccataagggtggcggttcaacaactaacggccgtaactctgcaggtcgtcgtttaggttctaaacgtgctgatggccaaactgtaacagctggttcaattctttaccgtcaacgcggtacaaagattcatccaggtgaaaatgttggtcgcggtggcgatgacacattatttgctcttatcgaaggtgtcgttcgtttcgaacgcctcggtaaaaacaagaaaaaggtttctgtatacgctgcagaagctaaataatttttctcacacccactttatgtgggtgttttttttgtgcgagagaagcggggctgtcgtcacattctaaacgtgttccatcagtcatatctctccggttaaccctgagtcacaaatgattgttccacaatcttttgcaactctgtgttaatcctctagatatcccagactgatgtcacactctgtttgtgtaaatccagttttactggtatactaattactcaggcaacaaaccattgacaatctaaaagtgagtgttcagatcgacttttgctcgattgaatacgctaaaagggattggcgggtgccggtccctttttttatagctacttttagggataaaaggctagaaatacttgcttttgagcctgatttcttgctatgattaggacaatggcatacttatataatgctcggaggataaacaatgttatcagtaaatgattttaaaaatggcttgaccattgaatttgacaacaacctatggcggattgttgaattccaacatgttaaaccaggtaagggtggcgcttttgtccgctcaaaacttaagaatttaagaacgggtgccaatcaagaaaagacattccgttcaactgaaaaagttgaaaaagcaatcattgatacaaaatcaatgcaatatctttatgcagatggtgacaaccacgtcttcatggatactgaaacttacgaacaattagaattaccagcagcacaaatcaatgatgaattgaaatacttgaaagaaaatatgcaagtttctatcatgatgtatggtagtgaaaccttaggggttgaattaccaaacacggttgatttagcagtggctgcaacagaacctggtgttcgtggtgatacatcttcgggtggtactaaaccagcaacacttgaaactggcttagtggtccaagtaccgtttttcgttaacgaaggtgatttgttaacgattaacacatctgatgggagttacatctcacgggcataggctaaattagcaagaacttgttaggaggggtttcgatggcagaagaaacaaatattgtacttgatacacaagaaaatgcattgggcaagattcaaatggcacctgaagttgtggaagtgattttagggattgcagcaagcaagattgatggggtccaccaaatgcgggggacgttatcatcatccattaacgaattgtttggtcgttcgaatcacggtaaaggggtaactcttaaggtgattgatggcaaagtgaatgcggatgtttatgtttatctgaactatggtgtttctgtgccgaaggttgcccttgcgatgcaagaagcccttaaagaacaattattgttcatgactgatttagaactagcagaagtcaacgtacacgtggtgggcgttgtcactgaaaaagcaccaaaaattattgatccagatgacttatttaacgatgaaacacctgatcaaaatggagaccaatcttaatgcctaattttaaccgacaccaaattcgccaagctgcatttcaagtgttgtttgcgttaaatgctaatgacacattagaattggcagatgcttaccaagccgttttaaccatggatcaattcgatgctgaagaagttgaagaagttgctgttccagactaccttgccttcttggtaacgggcgtcacagaacatcaagcagaattagacgccgctttaacgccatacttgaagaagggctggcaactatcacggttagccaaaccggatttaattatcttgcgtttagggttgtttgaaatgcaaaattcaacagaagcacccgataaagtggcgttgaatgaagcgctcgaacttgctaaacaatttacagatgatcaagcaaaaggttttatcaacggcgttttatctaaattcgttgaagcttaattagtaaaatacgaacgaaatcacttaaaacacgttaaaaagtatttttttagcgtgtttttttgaatttaaacggtcattatcagctgataacccggaattaaccgattaactatgctaaaatagaaacatcaaatatcgataaataggggttgttaactttggaattactagatggtcgagcacttgcaaatgaattaacacaagcacaacaaatggcggtggcaacactcaaacaacaaggggtaaccccgaaattagtggtcgtcatggtgggtgatgatccagcaagtgcgatttatacgcaaagcaagcaaaaaagagcgactaaaattggcatggcatctgagttaaaacgcctgtctgctgaaacaacggaagctgatttattagcggttgttcgccaactaaatacggatgaaaccgttgatggcattttagtccaattaccattaccaaaacaaattaatgaagaccatattatccgggcgattgacccacaaaaagacgttgatggttttagcccagtcaatattgggcgattatggcttaatcaaccgggcttagtggcctgtacgccaaatgggattatgcgcttattggcagctcacgatattgacgtggctggcaaaaatgtcgtgattgttggtcggagtaacatcgttggtcggccattggcagccttgatgctcaatgccaatgccacggtcacgattgcgcacagcagaacggcagacttaaaagccctaacgaaaacagccgacatcttagtggcggccatcggtaaaccacacttcttcggcattgaggatgtcaaagaaggggcggttgttgtcgatgtcggcattaatcggcttgaagatggaacagtcaccggtgatgtcgattttgaagcccttaaatcacatgttagtgcgatgacgccagttccgcgtggcgtggggccaatgacgattacgatgctcatggatcaaacgattgagattgcaaaggaacgtgctaaacgtggttaaaccaacagactatttaacagtcaccgcattaacgcagtatttaaaggctaaatttgaacgcgatccgtatttggatcgggtttatttaaccggcgaaatttcaaatttccgcttacgaccgaatgcgcatcaatattttagtttaaaagataataaagctaagatcagtgccattatgttcaagtccgcttttgaaaagattaagttcactcctgaagaggggatgaaagtgcttgttgtgggccggatttccttgtacgaagcaactggaaactatcagatctatgtggaacggatggagccagatggtcttggtgcattgtatcaagcctatgaacagctaaaagctaaattatcggctgaaggcttgtttgatgcaccaaagcaactattgccgcgctttccaaaacggattgcggtgattacgagtccttctggggctgttattcgcgatattataacaacgacgcaacgtcggtatccaattgcccaactcgtcttattcccagcggtggttcaaggtgacggtgcggctgatattttagtcgatcgactgaatcaagttaatcaacaaggggatttcgatacaattatcattggtcgtggtggtggttcgattgaagatttatggccgtttaatgaagaacgcgttgcgcgcgcgattgttgccagtcagattccggtgatttcatcagttggtcatgaaacggacacgactattgctgatttagtggcggatgttcgggcagcgacaccaacagcagcagctgaattagcaacaccggttttgacggacgaagtgttgaagttgcaacaacaacgtttgcggttatatcaggcattttcgaaaacattggcattaaacaaaaagcaattggtccacttacagaacagttacgtcttaaaacagccgcaacgcttgtatgacggctatttacaaaatgtcgatcagttgcaccgtcgtttattgttggcgcaacaacaacgcttacagactagtcaacagaatgtacaactcttgcagcaacgcctgcagtcgcaatcaccaagtggtgcgattcaacaagcacaaagaatgttgactgataccgatcatcgtttgaaacgagcaatcgagagccttgtccaaaatcggcggcaacaggctggacaagcggtggcagccttggatctcgtaagtccgttgaaaattttgggacgcggatttgcttatgtaacggatgataatcaaaatgtaatgaaaaaaacgaccgattttacggtcgaccaatcaatcgagttacatgtccaagatggcctcgtgaacgcgcgtgttacggccactcataaaggagacgaataagatggcagaaaagaaattaacatttgaagagaacttagcacaattggaagcaattgtgaatgaactggaaacgggcgatgtgccacttgaaaaagcgatgactgcttttcaaaagggtgttaaattaagtcaaacattagaagaaaccttaagtaaggctgaaaaaacgatggccaaagtgatggcagataatggcgaagaagtcccattggatgctgaggcacaagaataatggttgatttcaaaacgttcgcgcgccaacaagtgcccgcatttgaaacctatttgactgagcaacttgcccagattgaagaaccaaccttgcaaaaagcgatgacctattcagtgatggctggcgggaaacgtctccggccacttttggtatttgcggtgcttgcaagtgtggggcgaccgattaatcaaacggcgtatcgcgtagcgggggcattggaattaattcatagctactcattgattcatgatgatttaccggcgatggataatgatgacttacggcgcggtcaacctacgaaccataaggtttttggcgaggcgcaagctattctagccggcgacgggttattgacacttgcatttgaatggttaacgacgaccgatttgacgactgatcagcagagccgtactgttcgattattggcgcaagcagccggtccaagtggcatggttgctggtcagattgaagatatcgaaggacaaactaaaactttatcgttagctcaattgaaacaagtccatcagctcaaaacgggccgtttgattgaatgcgcggtcggcttaggggcgattttggctgatttatccgatgaacaaatggctagtttacagctttttgcgcaaaattatgggttggcatttcagatccaagatgatattttagacgtgacaagcactacagaagcgatgggcaaggcggtccataaggatgctgacgaacataagaatactttcccaggcttattgggcttagctggtgcaaaagacgcgttggatgagacttgtcaggccgcgcaaactgctttaacggatttatccgggttagataaagcactattaaatagttttttaaactattttaatgaataggagaacagatgaaaaaagaacgggtagacgtattattagtccaacagggattatttgattccagagaacaagcaaaacggtctgtgatggctggtgaagtgtacggtaaaaatgatgaacgaatcgacaaaccgggcgaaaaaatcgacgctgaaactgttttaagtgtcaaagggcgtaagattccgtatgttggccgaggggctttaaaattggcgaaagcggtcgaggttttcaacatcgatttacaggataaaatcgcacttgatatcggttcttcaacagggggctttactgatgtggcgcttagaaatggggccaaactctgttacgcactagatgtgggttataaccaactagcatggaaattgcgcgaagatccacgcgtcgtcgtgatggaacgggttaattttcgttacagtcaaccagaagatttcaccaatggtcaaccagattttgccatgacggatgtttcgtttatttcgttacataagattttggtgccgttgaaacccatcttgaaaccggactgcgaagcggttgctttaattaagccgcaattcgaagccggccctgaaaatgtcggtaaacacgggattgtgcgtgatccgaaagtgcataagatggtggttaaagacatcgttgattatagtttagcgacaggctacgacgtgctagggttagatttttcaccaattaaaggtggcgaaggcaatattgaattcttgattcatctacggaatacgacggctgagactggaacgatggcccaaaacgtgaatattgatacggttttagagaatgcctatgctgctttgaaacgaccaacgggaaaatagtgtataaaactttgtattttatgtataaatgcgctatcattgaggaatagaataatttctcacatgaagagggtgttttaatgcgcaaggtagatcggcaacgactgttaaaaaatttaatccagacccatgagattgaacgacaagaggattttgtgaagctgttacaagcggaagacatcgatgttacgcaagccacgatttcgcgggatattaaagaaatgcagctcattaaagtgccaaatgcggacgagggctatcactatagcctaccgcctgaaaagaaattagacgttaaagaaaagttgcgtcggattttacgtgacgcctatattacgcataaccaacaagactattttgtcgtgattaaagccttaccgggtaacgggacggcaattgctaatcttttggatcaaatgcagctcagtggtgtatttggtacaattggcggcgacgacaccgtgttggtgatttgtaaatcagaagaaaatgctaaacagtttacgaagtttattgaagacttgctaaagtaatttggcaagtttttttagcatcaagagaaacgaaagggggatgatcagatgttacaagagttggtcattcacgattttgcaattatcgatcagttagcaattagttttgaagaagggatgacggtgctctcgggggaaaccggagccggtaagtcaattattatcgatgcagtcgggttactcgttggtggccggggttcacaagactttatccggactggtgctaaaaaagcgacccttgaaggcttatttacgatgacgcctaatggcacaaccgccgcagtattagaccagtttggcattgaacacgacgaacaaaccgtcttattacagcgtgatttagccgttaatggacacaatgtttgtcgggtcaacggtcatttggtcaatacaaccactttgaagcatattggggaaaccttagttgatattcacggtcaaaatgaacaccaagaattaatgtatccagatcgccacttggggttgttggatgaatttgcgcaccaaaagttaacaaccgcgaaggcagcctatgccgaaacctatgctgcctatcgtaaagcacagcgtgccttgaagcaaaaacagcaaaatgaacaagaatgggcccaacgcttggatatgctgaaatttcaaactaacgaaattgatgcagcccaattacaggctgatgaagaaagcaagttagtcgaagaacgagccaaactaatgaactttcaaaaaattaaccaagcgttgcaagccagtcacacgattttagcaggagaagacgggaatgcgttagaccaaatcgcagttgcaatgaatcagatgcaagaaattgctgaactcgatccagaattcaagcgtattgcggacagtctgcagactggttattacacgttgcaagatagtagcattgatattagtcgggaagtttcaaacttagaatgggatgaagcacggttagatgaaatcgaacaacggctagaaactattaataatttggaacataagtatggtgattcaattgccgaaattctcgcttatggtgaaaaaatcggggctgaactagcagcgatgcaagcaactgaagcgaacgcaagtgagttggagcagcaattcacgcaacttgaacaacaacttaggacaaacggacaaacgttgacacaattacgccaaaaagcagctaagcaacttgaaaaagcggttcatcaacagttaaaagcgttatacatggaaaagacggtctttaaagttgaattcttgccaaatgaacaggaacagttcatggcctccgggatggacaaagttgaattttacattcaacccaaccctggtgaaaaactacggccgctcgctaaaattgcttctggtggggaattatcgcgcttgatgttagcccttaaaacgattttctccgaatcacaaggcgttactagcatcatctttgatgaagttgataccggagtgagtgggcgtgtggcccaagcaattgccaataagattagtgaaattggccaacattcgcaagtgctctgcattacgcatttgccgcaagtcgcagcaatgagtgatcatcagtatcaaattcaaaaacaggtaaaacaaaatcgaacggaaacgtccgttcaaaaagtaaccggtaaacaacggattgctgaactggcgcggatgttagcggggactgaagtaacagagttaactttagaacatgccgaagaattagtggcattagcggaaacggctaagcaaagtcgccgacattaaaataagggtgcagccaaaatatttttttggctgcacccttatttttttgcttaacttttcttttgaatgtaacgaatttgattgcaaaggacaatcttgtagaggttcgaacgacactcttttagcagatacttgttcgcactgagttgtttaaccaagcgcccggtcacttgttcgagatgatcgttaacattgaattgcaccgcaacatggtagtggcgttcaaacgcttgggtcataaataattgaatctgagcaggttgcatttggggttgttcaacaaaagcagtcgcttctggtgtaagttcaaaaaagcggtgatattgtttaaccaattgttgactgagtccgctaaccgttgcttgtttaaattccatgatttcatcctccgaacacttgtttgtgtttttattatacgaacaaatgttcagaattgcaagcggcattttttgatttttttcgtgtataataggatgagctgatagaaagggtgatttgatgggcaaaattgaatatgaaattatggcagaaatcggtgtgttgagtgaaaatccagccggttggcgtaaagaattgaatttaatctcttggaatcaacgtgcaccaaaatttgatttgcgagattgggcaccggatcatgccaaaatgggtaagggtgtgacgctgtcaaacgacgaaattgcgtccttaaggttaattttaaatgagatggaaacaaagtagacttgaaatttcccgccaaatagtgcaaaatagactttaactattttataaaagaagagggaattacgtagatgtccaatcgaggaatgttgatcgttttatcaggcccatcaggggtcggtaaaggaactgtccgtcaagcaatgctagaagatgaatttcgtgattttcactattcagtttcgatgacgacgagaaagccaagaccaggcgaacaagatggtgttgactattattttgtgagcaaagaagaattcgagcaagaaattgcaaatgatggtatgctagagtatgcacagtacgtggataattattatggcacaccgatgaagtatgtgaatcagacactagactcagggcgcgatgttttattagaaatcgaagtccaaggcgcaatgcaagtgcgcgagaagtgtcccgatggcgtcttcatcttcttgacaccacccgatttattagaattgcggaatcgaattcaaaaacgcggcacagacgatcaagccacgattgataagcggatgcaaaaagcagccgacgaaatcaagatgatggaaaattacgattatgctgtcgtcaacgacgaaattccaaatgcggttcaacgaatcgaaaagattatcgaaagtgaacacttacgagtgccacgtgtgatcgaccaatacaagaaaatgataggggaataataatatgattgtatatccttcaattgataagttactagaaaacgtgaactcacgttactcattggctgttttagctagcaagcgggcccatgaaatcgaagccggtgatattaagatgttatctgaatacaaatcacctaaaacggttgggatggcaatggaagaaattgctgctggcaatgtcattattgatcctgattcattgatgcttgaaaaagatgctgaaaaaatggataagctcgctcaaaaagacggcgaataagaataattaaagaacctgcatgtttagtttattcatcgatggatgtttaaattaaagtgcagtttttttagttttagggggttttgaaagtggatttaacgaataaacgaattgcagtttatgtgacaggtggcattgccgtctacaaagtggctaatttggtgcgcggattgattaaagcaggtgctgaggtccaagtggcaatgactcaggcggcaaccgaatttgtcacgccactgacgtttgccacattaacgcgtaaacccgtgttaactgatttgtttaatcaagaccaaccggatcgggttgcccatattcacttagcggattggactaatctggcggtgattactccggcgactgctaatctaatcgggaaactcgctaatgggattgctgacgactttgtctcgaccgccttgttagccactaccgcgcccaaattaattgtgccggcgatgaatgaacatatgtggtttaatccagctacccaacggaatttaacccaacttaaagcagatggctatactgtcatggaaccggataccggctttttagcggaaggctatgctggcgtcgggcggttccctgaagaaaccgcgattatggcagaagttgcgcaacaattcggaccgcaacggttaagcgggcagaacgtggtggtgactgccggtgggacacaagaaccaattgatccggtacgctacattggcaaccggtcttctggtaaaatggggtatgcagtggcccaagcagccgtgacgatgggggcgaatgtgatcctcatcagcacgcgtccagaattgccagtcccggctggtttgcacaaaataatttacgttgaaacggcggcgcaattacaaggcacagttagcagtgtctttgaaggggccgatgttgtggtgatggctgcggcggttgccgattttaaaccggcccaatatgtcacgcacaaaatcaaaaaacaaccgaacacaactgagatgcagttaactttagaccgtaccccagatattttggcgacgcttgggcagcagaagacgcatcaattcttggtcggattcgcggcagaaacagatgatttactacaaaatgcccaaaccaaactagcagctaaaaatgttgatttactcgtggcgaacgatgtcagtcagcatgatcggggctttggtgttgatcaaaatgcggttacgcttttacaaccgaatgcagcaccggaaacattagcgttggcggataaaagggtgattgcgactcaaattctagaacgagttgctgacttgttagattaactaaaaaggaggatttagatgccacaaatcgcaaaagtgattgtcgatgtgccgacgatgcaaactaatcggccatacgattaccaagtaccggatactttatcagacagtattcaacctgggatgcgtgtggcggttccttttggcaaaggtgatcgattaattcaaggctttattttgtccattcaagatcaagccaattttgaggggcaattaaagccgattacggcggtcattgatttacaaccggctgtgaattcagaattacttcaattatcaagttggttggcagagcggacctatgcctttcagattacgtgcttgcaaacgatgctcccaagtgtgatgcgtgctaagtattctaagaccgcgcaactagttgatgaaattgatccagccttacaagcaagcctgttcaatggtaacgacgaattaacgtttgaccagtcgctagatcccgaaaagttaaaacaattgatgcagttacaacgccaagggaaaatcgaagtggtctaccatgtcgatgatcgcgcccgcgtgaagcaattaacggcgattgaaccggcattatcgtttgaacagttagaagaagcgcgggccggcttacgtaagtcagcgcaaaagcagagtcaactcattagttatttacaaagtttaattgatcagcccaatcccttattaaaggatgttttggccaagacgacttttacccgggagaatatcaagacaggcgccgacaaaggttggttacgccaagttaaagttgaagcttaccgaaatccttatcctaaaaccgtcacaacgacgcaaaaaatggcgttgactgatgaacaggctgatgcggtagaagccgttgtagcggctactaaggcccaatctgatcgggtttttctagtcgaagggattacgggcagcggtaagaccgaagtctatttacaaacgattgatgcggtcttgcaacaggggaaaactgcattaatgttagtccctgaaattgctttgaccccgcagatggtcaaacgcgtgaagggtcgctttggtgatcaagttgccgttttacatagtggcttatccgaaggtgaaaagtatgatgaatggcggcgaattgaacgcaaagaagctagcgttgtcgttggggcgcgctcagccgtttttgcaccattggagaatattggtgtgattatcatggatgaagaacatgaagcttcctataaacaagatgaaagtccgcgctatcatgcccgcgatgttgccatctggcggagtcagtaccatcattgcccagtgattctcgggagtgcaacaccatcgcttgaatcgcgtgcccgtgcccaaaaaggcgtctaccaactcttgcgcctgacgcaacggattaatcaacagccattaccggcagttgagttggttgatatgcgcgaggcgatgaagcaacaagccagcagcaatttttcacctgcgctattagatgcgttaaaggatcggttgcaaaagggcgaacagagcgtcctcttattaaatcggcgcggtttttcatcctttatcatgtgtcgcgattgtggctttgtcttgcagtgtcccaactgtgatatctcactcacgttgcatatggatacgcactcgatgaagtgccattactgtggtcatgaagaagcaattccgcggacttgtccaaattgtcagagtcgccagattcgctatttcggaacgggaacacaaaaagttgaagcagaactccaagagctgattccaaatgcccgtattctgcgcatggacgttgatacaacccgcaaaaaaggtgcgcacgctaaattactcaaacgctttggcgaccacgatgccgatattttattgggcacgcagatgattgccaaagggcttgatttccctgatgtaacgttagtcggcgtgattaacgccgataccgcccttgggttacctgattttcgggcaagtgagcgcacgttccaattattgacgcaagtcagtggccgtgctggtcgtgccgataaaaccggtgcggtaatcgtgcaatcttttaatccggaaaattacgccatccaatttgccaagcaacatgattatgaaggcttctatcagtatgagatggcagtccgccatcggggcggctatccgccgtattattttacggtacagttaacgattagccatcctgaagaagcgttggcagccaagaagagtttccacattgcccgtcaattacggcccgtcttatccgaccaagcgattgtgctgggtccgacgccgaagtcgattgcgcggattaataatcgttatttctatcaaattgtgattaaatataaacaggaaccacaacttcaggcgaaactcgccgagattctcgaaacgacccaaattgatacccgtcatggtttcaagattgggttggacaatgaacccctacaatttacttaaagtgagcgtgattgattaatgacatccatcgtatttatggggactccccaattttcagtaccgattttagaagcccttgtggcacacgattatcaagtcctagccgttgtgacccaaccagaccggaaagttggccgcaagcaagtcttacaacaaacacccgttaaagaagcggctgttcgcttaaacctgactgtttttcaacctgaaaaactcagtggtagtcaagaattagcggacgtgatggccttgcaaccagatttaattgtgacggcagcatatggtcaattcttgccaacgaagttattagaagccgctaagattgcagccatcaatgtgcatggttcactcttgccaaaatatcgtggtggtgcacccattcaatatgctgtgttaaacggcgattcagaaattgggattaccatcatgcatatggctaaaaaaatggatgccggtgatatgattgaacaagccagcattccaattgaagcttcagacgacaccgggactttatttgataagttaagttatgtcggtcgagatctattattgaagacattaccaagcattatcgatcaaaccgcgccccggacaccacaagatgaagcacaagtaacgtttgcttacaatattactaaggaacaagaacaattagatatcgagcaaccagcaacgcaactggtcaaccagattcgtgcgttacggccacaaccaggcgcttggttgccaattaatggtcaacggacaaaattatggcaagcaactgttgctgaaacaacgacggatcaaccagccggtgtgattgtcgctatcaacaaaaaggatttcgaattagcagccggcaatggcagtgttttgaagattaccgagattcaaccagctggtaaggctaaaatgccggtccaatctttcttaaacggggttggcaaacaactcgcagtcggacaacaagtggtggtgcaagatgcctaaaaagacaccacgctatttagctgttgaaattttaacggcggttgccaaacaaaacagttattcaaacttggccctcgaccaagtgattaaacaaaaccacttgaatccccaagatgctggttttttaacgcagctcgtgtatggtgtgattcaacatgaaatgacactcgattattacctagccccctttattcaaaaaccagctaaactggcaacttgggtccgccaagtcttacggacggcagtttttcaacaggtttatttggatcgtgttcctgaacatgcgattttttatgaagcaactgagattgccaaacaaatgggccatgctggcacggctaagttggtcaccgcaattctacggaaccaacaacggactggattgcctgatttagcagcaattgccgatccaatcgaacgcctaagtgtgacttacagtatgccgcagtggttagtggcgaagttccaccaagaattagggcaatcaaaattggaacacttattggcaacgattaaccaaccagcgaatgcgtccattcgagtcaatacccgtgttaattcagttgatgccgttttggcagacttacaggctgacgggttaacgattgaatcgagtgtaattgtagccgctggattagttgcccacggcggtcacttagccagcggtgaattgttcgaacaaggcgcgtatataattcaagatgaaagctcgatgttagtggcaccaagtttgcaactacaaccaagtgatcggatcttggatgcttgtgcagccccaggtgggaaaacgacacatatggcgacttatttggatgccagtcaaggggggcaaattactgccttagacattcatgaacataaagtccgcttgattgagcaaaacgctaagcgtttgcatgttgcagacgtcattgatgcgcgggcgctcgatgcacgcaaagtcggtgaacaatttgaacctgaaacatttgataagattttagtcgatgcaccatgttctggcttaggcttaatgcgacgtaaaccggaaatcaagtatggtcgccaagcagcagacttattgaaccttcagaagattcaattggcgattttagaagccgttgcaccaaccttaaaagtgggtggtcaattgacttacagtacctgtacgattgtcccagaagaaaatcaacaagttgttgcggcttttgtggccaatcatccagaatttgaaatcgtaccagtagcactcgacaaaccattgccagccaatcaagcgacaccgtttgtccaaatctatcccgatgattatcaaacagacggctttttcatcgcttgtttaacacgacgggcttaaattattaattgaggtgaattcttatgaaagttgcttttcaaaccgatgtcggccaacaacgccaaaataatcaggactatgtcggcttttataccaataaaagcggtgcgcagtttgcgattgttgctgatgggatgggcggtcatttaggcggcgatgttgcttcagaaatggcggtttcccatattgggtacgagttcgaacgaactgatgataccgacattgaatccatggttaaatggttaattttcgaattacaaaaagaaaacaaacatattttagcgaaggctaatcagtatgatgatttgtttgggatgggcaccacgctcgtcgcagtgttgatttcaggtgccaattacttagttgccaatattggcgacagccgagtgtatcgcttccggaataacgaactccgccaattaacagaggaccattccttggtaaatgaattggtgaaacaaggggagttaaccgaagaagcggcaaagcatcatccgcaaaaaaacatcattacgcgcacattaggcgtttcgcaagatgtcgatgccgatgtaacaatttacgaatttgaaccagatgattatctattattatgtacagatgggctaaccaatatggtcgatgatgaacaaattaagaccacgctgatgacaccgacatcgctggaagaaaaatgtgcggcattaattcaacaagcaaatgatgccggtggcttagataatattacggcgttaatcttacatcaaactggtgaggagggtgcgcgatgatggagacaggctacgcggtcaatggccgctatcagattatccgtccaattggagaaggtggcatggccaacgtttatctggcccaagatctgattttggatcgccaagtagcggtcaaggtgctgcgacttgatttacggaacgatccgaacacggtacgtcgctttaaacgcgaagcacttgccacaactgaattgaaccaccccaatatcgtcagtatctatgatgttggtgaagaaaacagcatgcaatacatcgtgatggaatatgtgaagggaacagatttaaagaagcatatcgttgaacacttcccgattccttatcaacgcgtcgtcgatattatgacgcagattttatcagcggtcgaaaatgcccacgcgcacgatattattcatcgtgatttgaaaccacagaatatcttggtcgatgaagcaggtaacgttaagattagcgattttgggattgcgattgcgctcagtgaaaccgcgatgacccagaccaatacattactcggatcagtgcattatttatcaccagagcaagcacggggttcaatggcaacgaaacgttcagacatctattcactcgggattattctgtatgaaatgttaacgggtatggtgccatttgaaggtgaatcggctgtttccatcgcgattaaacattttcaagatgctgtaccacccgttcgagattatgatccgcggattccacaagctttggaaaacgttgtgttaaaagcaactgccaaagatccggacgaacgctacagtgatgttgggcaaatgaccactgatttgagtacctcattatcagctagtcgggcgcatgaaccgaaattcgtgccctcacaaggtgatatgggtgaaacaaaggtgattccggctctcgacccagaagggattacgcgccaaaacgatgcgccagaagccaaacccaaagatgagactgaagtaaaagacgatcagaaaaagaaacagccgcataagaagtcgaagcggaaatggtggtttgtggggcttggcgtagtcttgttagtgatgctcggggtcttcgctgcgtacgcaatgcaaggcagtgaagtgactgttccagatgtgacagacatgacgcaagaaaacgcgactgcagcattaaccgcagataaattaaaagttggtaagattcaaaaaactactagcaataagtacagcaaagggcatgtgattttatcgacgcctggtaaaggaatgcatgttaaatcgggcagtacggttgatctaacaatcagtacgggtcgtaaaaagtatgagatcgaagactatacggacaaaccgttcacagatgtcagcacgttattgaaacaaaagggactgacggttgtgcgcaaatatcagagttcacgcagtgttgcttcgggactggttttagaccaaagcattgccgcaggtgaaaaagttgtcccaagtaagacgacgattaccttgactgtcagcagcggcaagccaagcattactttacgcaatttgagtaattacacgaaacaggctgttcaagactatgttgatgacgttggtttgacggttactttttcagaggattactccaatacgattgatgaagggttagtcattagccaatcacctggtagtggtgcatctattcaagaaggtgccaatattaacgtggtactttctaaaggtaaaaaagcgcccgctaccaagagttttacgaagtcgattacgattccgtttgataattccttagcaacttcacaaagtagtacaagcagctcgagcgaatcgggtgacagtagtagtacgagctctagttcaagtagtacttcaacggctacgacgaataagattacgatttatttagaagatagcacgcattcaataatgagtgtttataaagaaatgacgattaccgcggatacaaccgttgaattgccatttacgattaaagcggaccaagccggccgtttccggattttaagaaatggtcaagagattctatctgatgaccatgtgacaaactaattgggaggtgacctattgcagacaggacagattattcgcgccctcagtgggttttatgatgtacaaagtgaaggcaaaatttatcgaacgcgtgcgcgtggtaatttccgtaaacggaaaattacgccacttgtcggtgattttgtcgaattcgagagtgaaagtgaaacagaaagtggctatattcttgagattttagaccgtaaaaatgagatgattcgaccaccagtcgctaatattgataatgctgtcgtaattgtttcggcggtggaaccagcattctccttgaatttgttggatcgcttcttgatttatattgaatcgctgcacatgcaagggttagtttatttaaccaagaccgatatgattagtgatcaacaataccaagaaattagtgattacttggcgtattacgcgaagatcggctatcaaatttttgcaccgcggaccgcctttacaccggagataattacggcaattgaagacacgttcccgcataaaacaaccgtctttacaggacaaacgggggccggtaagtcaacgttgttaaaccacattgacccgagcttgaatattgcaactgccgaaatttcgcagagtttaaatcgtgggaaacatacaacccggcatattgaactgattccgttgaatgatgggttagttggtgatacgcctggcttttcatcacttggtttattaaacgtcacgattgaaaccttggttgaccgattcccagagttcagagaaatcgggcaaggatgcaagtttagaacgtgtcaacacgtgatggaaccgaaatgtgccgtgaaagaagctgtcgacagtggcgaaattatgcaaagtcgttatacgaattatttacagtttagagcagaattaaaggatattcggccagtttacaagaagtcaaaataaaaatgtgatcggagttttgatgatgaaacaaatcgcaccttcaattttaagcgcagactttatgaacttacaaagagacgtccaaaaccttgaaaaggcgggcgctgatctattacatgtggatatcatggatgggatgtttgtccccaacatgtcgtttggcccccaagtagtaactggcttgcggccattgacaacgttaggcttagatgtccatttaatggtcgaacaaccagaacgctacatcgaacaatttgcagcagctggttcagacttaatcatgattcatgccgaagcaacgcaacatctctaccgtggtcttcagatgattaaagatgctggtgttaaagcaggtgtggtgatcaatccagggacaccagtcagtgcgattgaaccagtcttatcattggttgatcaagtcttagtaatgacggttaatcccggttttggtgggcagaagtttattccagcgatgttggataaggtcactgaattagcgacttatcgcgatcaacatgctgatgcagattatacgattgaagtcgatggtggggttaacgaccaaaccgtcggtgcgtgtgccaaagcaggcgcagatgttttcgttgccggttcatatacgtttgccggtgatttagcaacccggattgcaactttaaagcaggctgctcatgacgcggattaatgtgttggtgggaggaccagtcagtgagtgggcccccgaattggcgcagccagaaatgattgatggtcaatgggtgacagcagaccgtggtacgtggcgcttattgcaaaaaggcgtaacacctgtcgtgtcagtcggcgattttgattcattgacggcggctgagcggaccaccgttcaatcagcagtaaaggatattcgctctgtgcaagcagaaaaagatgataccgacactcagttggcattatcaattgcgctaactgaatttaatgcggatcaagttgtgctttatggcgcaacaggcggtcggttggaccattttcttgctaatctctttatgcccttagaaacacgttttaagccgtttttagaccgcttagagatgcgcgatcggcaaaatacgattcggttctatgcaccagggacgtatcaattacaaaaagaagccgataaacggtatctggcctttgtgccattagttcccacaactggtttaaatttaattgatgaaaaatatcgcttggtggattaccaaacgcaagtcccgatttcatgggctagtaatgagttcatcggtgagaccggccaattcagttttgaaactggggtggttgcggtgattcaaagtaaggattaaaaagacggctcggataaaattattttatccgagccgtctttttggttgccataaacgtgttcgatcagtcatctcccgatgattagccgacttatctcgtactctttgccaaaaaaaatagaccgccaactggcggtctatcaattgaaattatacacgagttactttgcctgatttcaaagcacgggctgaaacccaaacacgtttaggtttgccatcaactaagatacgtactttttgtaaatttggcttccaagaacgacgagatgcgttcaaagcgtgtgaacgcttgttgccaaatgatgttttacggccggtaataacgtcttttgccatggtcttattcctcctttaagtaaagccggtagaattaacgagaaacataatatgattcagttagtcttaatagttgcatgcatgcacaccggcttatacaattcacttaaataatttaccataatagtttggggaatgcaagagctctttcaaggaaatttacttgacagtccaaaataagtcgtttaaactcattaaagtccaaaaataagccgcatttggggaagaattcatcaccagttgctttgcaactcttctccgctatgctaaaataacaataagtatggcacaaggaggctattttaatggctgttaaaattaaaacacaatatggcgatattgatattaccaataacgtgattgcaaccgtcgttggtggtgctgcaacagatatctacggaattgttgggatggcaagtaagaatcaaatccgtgacaatttaaacgatattttgaatcgtgagaattataatcggggtgtcgtagtccgtcaagaagacaatggcgttgcgattgatgtctatattattgttggttacggcattaagatctctgaagtttgccgtaacgtccagagtaaagtgaagtacaatcttgaaacaatgttgggtgtcagtgcgaactcagtgaatatttatgttcaaggtgtacgggtattagaagactaaaactaattagcggagctggccactaggtccagttctatttgtttttgttcaaggaggaacattcgtgaaagttactgaaatcacagcagcagaattccaagcaatgatgcgggttgctgcacatcggcttactaaaaatgcagaatttgtcaattcattaaacgtctttccagtgcctgatggggatactgggaccaatatgagtttaacgtttcaaagtggggccaaagcagttaatgaaaacaacgcgcaatctgtcggtgaattatctaagagtttagccaaggggcttttgatgggcgctcggggtaactccggggttatcagttcacaaattttccgtggtttttctaagagcatggctgaaaaagaaacgttggatgcacaagatttggctgacgcattcacaaatggtgttcaaacggcttataaagcagtaatgaaacccgttgaaggcacgattttgacggttgccagaaaaggcgccaaagctggtgccaaggttgccggtcaaactgatgatatcggtgcagttatcgaagctgttgttgagggttctaagaaggccttgttgaagacccctgaattactccctgtcttaaaagaagtcggcgttgtcgattctggtggtcaaggattggtcttcatctatgaaggtttcttagaaggtttaacaggccaagcacctgcaaaagatctttacacacctgatgaagcggaaatggatgaaatggtcaatgccaatcatcatcaaaccgctcaaatgggtacagaagatattgaaaatggttattgtactgaaatcatggtcgcccttggtgacgggacaactgtcgatcgcgaatttgattatgatgaattccgcaatcatttaaacggtgttggtgactctctcttagtggtagccgatgaagaagtggtgaaggtccatgtgcatacagaacatccagggacagtcatggcttacggccaacactttggttcattagtgaagattaaagtcgataacatgcgtttacaacatgatacgattgttgaaaacgaccaacaagctgctgcccctgtgcaagcagaacctgttgaaaatgggattatcgcgattgcggccggtgatgggattgctgaactcttcaagagtttaggggctacttatatcttaagtggtggtcaaaccatgaatccaagtacgcaagatattttagatgcgattaaagcagccaatgctaaacaagtgatcttattaccaaataataagaacatcttcttagccgctgaacaagctgccgaagtggctgatattccagttgcaatcgtgcaaagtcggacgattgctcaagggatgaccgctctcttatcatttgacccatctgctgaattggctgctaatcaagaagccatgacagaggcgttagataccgtgattagtggtcaagtaacgcaatcaatccgggacacgactttagatggacttgaaattaagaaagacgattacatggggattatcgatggtaagattaaggtctcaacggctgaacgtttaacagcagccattgaaatggtccaaacaatgcttgatgaagacagtgaaatcgtcacaattattatcggggaagacggcgatgcaacagaagctgaacaaatcagtgatgcaattatggcccaagacccagaattagaagttgaagtacacgaagggaatcaaccagtttacccatacttgatttcagttgaatagttaatcaaataaaacgggaatgaggttgaatatacctggttcccgttttttagtagaagtacgtttaaccttggaatatggttaaaaagcacgttaagaaaaagaagtgtatcaaaagtgcttatcctgtgaggattagtttaattagccgaatgactagcgtagctacttgtttggctaatggtgctaaacgcaacaggatgcttttgaaagcacgttacaggaggctgtcaatgttaagtttaacggattctgttgctgtgttagctggcgtcggcccgaaacgtctgacagccctcgatcagcttggcataaggaccattagtgatttattgtattattttccgtttcgttacgaagatttgaaggtcaaggatttatccgaagcggcagatcaggaaaaggtgacgttaaaaggaacggtcgtcgctgatccggtcatcagtcgttggggaccagggaagacccggctgaatgtacggctcttgattgaacatgacgttgtgatggttactttttttaatcaaccctatcttaaggacaaatttgaagccggggtcgatgtcgctatttatggcaagtgggatgctaaacgtcatacattgacggggatgaaggtcctagcggttcaatcggctgagaatccatcgtttgcggccatctattccgttaataaaagtgtgcgtcaagggacactggtcaagatgattcaagaagcctttgatttgtatcaggacgttattcccgaattgatcccagaggatattcgcacgcgctataagttaatgaacgaacgcgacttaattgctggcatgcatttccctaaaacgtatcctgaagcaaagcaagcacgccgaagcgctatttttcatgagttcttcctatatcagattcaattacaagccattaaacaggctgatcggcatgtggcaaacggtttagctttgcagtaccaaaatgaagcacttaaagattttattcaaaccttaccgtttgatttaaccgatgcacaaaagcgagtggtgaatgaaatttgtcttgatttaaaatcaccagcgcatatgaatcgccttctccaaggggatgttggttctgggaaaacgattgtggcggcgattgcgctgttcgcggcagtgactgcgggttatcaagccgcattgatggtgccaacggaaattctggcggaacaacactatcaaagcttgcaacgcttattggcaccaatgaacgtgactgttggcttattgaccggttcgacgacggctaaagaacggcggacgttgttggcagacattgaatccgggcgcatcaatattattattggcacccatgccttgattcaagatgcagtggtctatcataagttaggctttgctgtaattgatgaacaacatcgtttcggggtcaaccaacggcgaattttgcgtgaaaaggggttacagcctgatattcttgcaatgacggcgaccccgattccgcggacgctggcgattaccgcgtatggcgagatggacgtttcaacgattgatgaattgccaaaaggacggattccaattgaaaccagttgggtgcgtagtaatcaagtcgaacaagccctcagctttgtccgtaaacaacttgcaaacgattcgcaagtctttgcgattacaccgttgattgccgaatctgaacagatggatttaaagaatgccgaggagatttacgcaacgttggtggaacaatttgaacctgattaccatgttgcattgttgcatggccagttaaaagatgatgaaaaaaatcagattatgaacgctttttctgagaacaaaattcaattactggtttcaacaaccgtcgttgaagttggtgtcgatgtgccaaacgcgacggtgatgctcatttttgatgcggatcggttcgggttggcgcaattacatcaattacggggccgggttggccgaggtaagaaaaaggcatactgtattctggtggctgatccgaagaaccaacaaggtgttgaccggatgacgattatgactgaaaccactgatggattcgtcgttgcgcagaaggatttagaattgcgcggaccaggggaagtctttggtgatcgtcaatctggattgcccgtctttaaagttggcgatccagtagccgactttacgagtttacaagtcgcccaacaagaagtgcaaaaaatcttcacgcttgatcctgagttggcagcaccggaccatacgccactcaaaacatacttacaacaacaaaagcaaaattacctaacgttagattgaaaacggaaagaggaatgatgatgaaaattgcagtagacgcaatgggcggcgattttgcaccccaatcagtaattgaaggggtgttacaagcccgctcagaattaacagatgttgaatttacgttgtatggtgatgaagcacaaattaaaccgttgattgatgatatgacgcggttaacgattgtgcataccaccgaaaaaatcaccagcgaagatgaaccagtgcgtgcgattcggcgtaaaaagcaagcttcaatggttctggcggcgcaggcagttaaagatggggaagcagacgcactcttttcactagggaatactggtgcgctcttagcagccggattattcgtgattggtcggattaaagggattgatcgtccaggtttaatgcctaccctaccagccattaattcagatttaggcttcaatatgttagatgttggggccaacgccgaagcaaagccggagcatttgcatcaatatggcttaatggggaacttctacgcacaagacgtccgtggcattcaaaagccgcgaattggtttgttgaataatgggactgaagctggcaagggtgatgagttgcataaggcagcacatcaactactggcagatgatctaacgttaaacttcattggtaacgttgaagcaagtgaactcttaaaaggggttgcggatgtcgtggtcacagatgggtttaccggcaatgcgacgcttaaagcaattgaagggactgccacaatcgtgatgtcgcaagtcaaacatgcgattatggatgctggtgtcaaagaaaaaatcggtggtttactcttgaaaaagagtgttggtgggattcgtgataaattcgacacatctgtttatggcggggctgttttattaggcttaaaagcccctgttgttaaggcgcacggtgctgcagatggccgcacggtttactacactgttcgccagattcatgcaatgctggcgaaccaaacgattcaaaaagtaatcgattattttgaccaacaaaatagcccaaaagaaaccgattaaaataggtggacaatgtgttccaaaggcgctacaatatacttcgcaagtctgatttgatttacttgaattgagttgcgaagttatgtataatcactggatacccaaagtgttaagtacgtaggtaagggtttcaatttggaggtttttaattatgaatgaacaagaaatctttgataagattgcggctattattggcgatcgatttgagttaaataaggatcaggtaacagacgaattgaacttcaaggaagacttggatgctgattcaattgatattgtggaatttgttttggaattagaagacacttttggtgccgaaattccggatgaagaagctgaaaagatcggtacggtagctgatgccgttgcttacattaaaacaaaaatcaaataataaccttaaaaacgagcctgttggttgtgagtattcgcgaccgacaggcttatttttttgcattttggtagattgcaaatttaatccgaattttcggacaaatttgtcagcataacctgatacggtgtttgccagtcgagtattttaagcggtcgctggttaatttggagtaacgtcgtcgttaaatcttgagcactaatgtgctcaaaacgagtccctttaggataaaaataacgtaaattccgattaaagcgttcgttactaccacgttcagctggcgtataagcatggcagtaataggtcttaataccatattgtgattcaagtgatactagtccactaaactcagtgccacggtccacagtaaagctgtgcaccggaccattaaaagtggttaggaacttagttagtgcttcattaacagtcgctgtcgtccgatcttttaaccggtatgcccaaaggaaccgtgatttgcgatcgattaaagttaataaaactgccttactatgcccacgaggaccaacgactgtatctagttcaaaatcgccgatgcgcttacgttgattaatcatcatgggacgctgttcaattgatcgccccaaagattgattatatttggatcgttggtcaacgttacgccgttggcgtacgccatgttcaggtagatcattcaaggagaaaccaattctcccctgatttagccaattataaatagatttagtagctagtttaaattcgtgagcaatcattcctggtgaccagcttagacgtaaatggttgagaattttttgctttaactcatcgctcagcttagttttccgaccacatcgtgatcgcttgtattcggcatctgtttgtgctaattcagcctgataaggttgacatcgagataattcataagaaattgttgacggtgatcggttcagccgaacgcccatttggatattggacagccctagttcacaaaaggtttcgattttaattcgttcagaataggttatactagacaaaagatcagctcctaaaagatgggtttgtggtaaacaccattttaaaggaagctgatcttttttgtccgaacagcgttcggattaattttacaatctaccttttaaacagtttgtgaaaatgagattattcacataataatcatttgcggatgcgttataatattagaatgattcttataatggctctgtatcaatgaaaataaattagaatattttaatctttattatttacttttcatttttaatcatgtattattatctttaataactgaagggagtgtccatatgaaacgagaaaagagtttggtattaggtataacaacagtggcggtcacattattattagcagcttgtggtaactcaggtagcaaggaagccgttaagactgacacagccagttttgcaactggggatgtcatttcgacaatggattcagcgttaaatacggatgtgatcggtgcacaggctttaaccgatacgatggaaggtctttaccgctacgagggtaaagaaattaaaccggcgattgcgactaaagtagtcaaaccaactaataacggtttaacatatacattcccattaagaaaagacgcgaagtggagcaacggtcaaccggtcacggcagaagatttcgtttatgcttggcgcagagtcgttgatccaaaggtcggttcacaatatgcttatatctatgaaggcattaaaaatgcagcagacatcacgactggtaaggaaccggttaattcattgggtgtagtcgctaaggataaacacaccttagaagtcacccttgaaaaaccaattccatacttcagtcaattgatgaccagttcaacattcttcccccaatatccagaagcagtcaagaaagctggcaagagttacgggacaaattctaaaacattagttttcaacggcccttataaattagaaaattggaatggcccagatagctcatggaaagaagttaaaaacaccaattactggaatacgaaagcagttaaggttaagacgttgaagtatcaagtggttaaagatccatcaacagctttaaacctcttccaaagtaataaattagatcggacggcgatcagtggtgacacagctaaacaaatgaaaaacgatccacattactcaaccttacaaaaatcagcaacattctacatgcaagtcaaccaagaaaagaatccaatctttaaaaatgcgaagattcgccgagcaatttcaatgacaattaatcgtaaagaattagtcgcacaggttctaggtgatggttcaagtccaattgcttctgtgacaccaaagaatatgtcatttgacccaacaactaagaaggattttgttgatgatttagacgcagcgggtaagaaaaatgcaagttacaaccctaaagaagcaacaaaactttggaacgaaggccttgctgaaactgggcaaacaggcaaaacattcaattacacattacttggcgatgatacggatactgccaagaaacaatccgaatatttgcaaaatactttacaaaagaacttaccaggtttgaaagtcacattagcgaacgtgccatttaagactcgtttaacacgttcaacgaacggtgatttcgacatggtggttagtgcttggaacgctgatttcccagatccaatcacattcttagacttgtttgtaacaggcggcgataacaatgatggccattggagcaatgccgaatacgatgcacagatcaaggcaagtaaaggtgacaacgccaatgatcctaaagcaagatggcaaaaccttgttaaagcacaagatattatgaatacagagtcaggtgtcattccactgtatcaatcaggtgtggcgtacttaactaacccaagccttaaaggtttagactacggcccttcaggaagctacaataatgtctcactttatttaaaaaaataaactgactttataaagatgggcttcagcgttgaaaaacaatgaagcccgtttttgttaggagcgaacttatgagtaaataccttattaaacgaatattctatttagtgctaaccctattcattgtcgcttctgtgaccttcttcatgatgaagttgatgccagggacgccatatacgaatcaggaaaaaatgagtgctgatcaattacggatcatgaatgaacagtacggtttgaacaaaccattaattcagcaatatttcatctatctaggtggcttgttgcatggtgattttggcacatccttccagttcaacaatcagcccgtcttgagcctaatcatgacgcgtttaggaccttcattacaaatcggggcacaagcgatgattgtcggctcattactgggtattttactaggggcagtggcggccattcgcaagaatacatgggtcgatggcgttgcaacgttcttttcaatcgttgggatttcaattccgaactttgtgttggcggtcttactccaatttttccttgcctttaaattacaactattcccaattgcgttatgggacggctggtcatctagtgtcttaccaacattagcactagcggttgcaccattggcgaatacggctcggttcatgcggactgaaatggtcgatgttttaaacagtgattacatcgaacttgctaaagccaaaggcaattcaaaatggcaaacagtggcaaagcatgccttacgaaattcaatgattccggttgttacgattatcgggccgatggcagtcaacttgatgactgggtcactagttgttgaaaatattttctcgattcccgggattggggaacaatttgtgaagtcaattatgacgaatgattatccaacaatcatgggcttgaccattttctattcattcttattaacagtgattattctagtcgtcgatattctttacgggattattgatccacgaattcgattaagtgacagtcagggggcgcactaaatggcggatattaaaataccagcgggctcattcaagccccttacacaagacacgcatgaagcacaagaaaaaattagtgcaccatcattgacgtttacgcaagatgccattcggcgcttaaagcaaaataaagtcgcggtggtttcattagttgtcctcttgattgtgatgttggctgctttattggcaccagtgattgcaccacaaagtccaaatacacaaaatgtggcgtacgctaacctaccccctaaaattggatcggggaatatccctggttttaccggtaagatggacgtttccggtgttaaagttgataaatatcaacaagcgggcgttcccaaaggcaaaacgtttatcttagggacggattatctcggtcgtgatttattatcacgaattttatacgggacacgcttatccttattaattgggattctagcgacattggtcgatttattaatcggaattccatatgggattgtttccggatggcgtggtggccgtttggatatgttcatgcagcgggtaactgaaatcatttcatcaattccaaacttaattgtggttgtcttgatgatgttggtactccgtccaggtttattgtcaatcgtcatcgcgattgggtttaccggttggattacaatggcccggttgattcgggctcaaacgttccaacttaaggaacaagaattcgtgctcgccgcacggacgttgggtgaaagttccaccaaaattgcttggaaacatctgattccgaatttatcctcaacgattattattcaaacgatgtttacaattccgagtgcgattttcttcgaagcattcttgagctttatcgggattgggattccagcgccgaatgcttcattagggacgttattatcagatgggcaaaaagctttccgtttcttgccatatcaaatgtggtatccagcagcagtcctctgtgtgatcatgattgccgtcaacttactagcagacggattaagagacgcattcgatccaaaatcatagcgtgtgtaagtaggcggttatctttcgcggattagcatagtctggcgaataatcaacttgttgattatttgttagacgtagctaaccataaaaagcagttaatgaaagcacgtttagaagcagagtcagtttcaaaaagcatgtcaatacaaggccgtttccacgcggtttcatcattggaggtcgtcaaatggcaaatattttagaagttaaacatttaagtatcgattttaaaacctacgcagggaacgtccatgctattcgcgatgtcagtttcaacttgaaaaaaggcgaaacactagcgattgttggtgaatcaggttcaggtaagtcggtaacggtccgtagtattatgggcttgttagcgggcaatgctcaaattaagggtggtacaatcaagtatcacaatgaagatctcttacaaaaaccagaacaggaaatgaatgccttacgtggtagcgatatttccatgattttccaagatccgatgacgtcattggatccaacgatgccgattggtaaacaagttgctgaacccttgttgattcataaaacaatgaataaggaagaagcaatgaaacgtgcacagagtgttttagagttggtgggtattccgaatgccaaagcacggatgaaagattatccgcatcaattttctggtgggcaacggcaacgaatcgtgattgcgattgcgattgttgattatccacaaatcctgattgccgacgaaccgacaaccgcgcttgatgtgacagtgcaagcacaaattatcgatttgatgaaggaattgcaacgcaagattgaaacctcaattattttcattacgcatgatttaggtgttgtggcagggattgccgatcgcgtagcggtaatgtatgctggtaagattatcgaatatgggttggttgatgaaattttttatcaacccaagcatccatatacgtggggcttattgaactcaatgccaacacttgatacttctggccgtcttgaagccattccagggaccccaccagacttgttggatccaccaaaaggggatgccttcgcaccgcgtaatccatatgctttacaaattgatgtggaacaggaaccgccatttttccaagtgtcgaaaacgcattttgcggcaacttggttgttgcatccagatgcaccagctgtggaaccaccagcagccgtccgtgcaatgatggctaagtaccaggcgacacaagttcaagagaaagtagggacaattgatggacaaggataaaaaagtattagtgtcggttaaacatttaaagcaatattttagccaaggaaaaaaatccgaagtcaaagccattgatgatgtctcatttgaaatctatgaaggcgaaacgtttggcttggtgggtgaatctggttctgggaagagtacaactgggcggagtatcatccggctatacaacccgacagatggtgaaattctattcgatggccgtgacattagtaagattaaaaatcatagtcgtgaaatgaaggcgttccggaaagagattcagatgattttccaagatccctacgcatcattgaatccacggatgaaagtcaaagatatcatcgctgagggcttgcatatccatcatttggttaaaaatgatgcagaatgtgatgcacgcgtcaacgagcttttggaattagttggtttgaataaagaccatgcaacgcgttatccatatgaattctccggtgggcaacgccaacgtattgggattgcccgcgcgcttgcggtaaaacctaaatttatcattgcggatgaaccgatttcggcgcttgacgtatcgattcaagcacaagtggttaacttgatgaaagaaattcaagaacagcaaaacttgacgtatttattcatcgcacatgatttatcgatggtgaaatacattagtgatcggattgcggtgatgcataacggtaaaattatggaattggcatcagccgatgacatttatgatcgaccattgcatccatatacgcaaagtctattgtctgctgtgccgttacctgatccaaaggtcgagcggcaacgtcggcgaattgcttatgatagttcaattgaggcagataatgaaggtcgtcaattgcgcgaagtggccgatgaacactatgtctatgcaactgaagctgaactagcgagttatcaaaccgctttagcagcaatgacaacgccatctgcataaagcaacgcctgttttgaaatattcgtttgcgtgttacaatgaatacttcaaaacaggcgttttttagtgattaataaaagaaacggtttgctaggaacgacgctgtttttttaagcgtataaacggtataatagtgaaagattaaacagttgaaatggggtaatttaattttggatgcagcactagtgagcgagcttcgagcccgctacggcattgaatttcagaatttagcactattggacgaagcctttacacattcgtcatacgtcaatgaacaccgggagttgggtcttcgtgataacgaacggctcgaattcttgggtgacgcggtgatggaaattacggtttcggaatacttatataaaaaatatccggactggccagaaggtaaactgacacgcttacgggcggcaatcgtctgcacgaagagtttcagtagttttgccaaagaagcgcactttgatcgatacattcgccttggtaaaggggaagaaaaaaacggtgcgcgggcacgagcaacacttttggaagatttatttgaagcttttaacggcgctttgttcttagatcaagggcgtggcgcagttgttaaattcatcgaacaagttgtctttcccaagattgaagccggtgaattttcagaccaaacggattataagaccaatctgcaagagttcttgcaacaagatggtgaagttgagattgaatataagttattggcagaagtgggaccatcacatgcccgtcaatttgaggtggatgtgatgatgggcgatcgcgtcttaggttcaggtgttggccggaacaaaaaagcagccgaacaagcagctgctaaagtggcgctttccaaactgaaataaagaaagaagcaaacgacagttgaaaccaaccgccgtgtgtagggagtttagtgcatgcagttaaagtcattggttttatcagggtttaaatcatttgctgataaaacagaaatcaatttttcagaaggtttaacgggcatcgttggaccaaacgggagcggtaaaagtaacgtcacagaagcaattcggtgggcgatgggcgaacaatcagccaagagcttacggggcgaaaagatgcccgacatcatttttgccgggactgatattcgaccacagatgaataaggcagaagtgacgctggcttttgataacagcgatcaatatttgaaacaagaacaagccaacgtcacgattacgcggcgtttatttagaaatggcgatagtgagttttatttgaatcaaaagagttgtcggttaaaagacatcgttaatttatttatggattctggccttgggcgagaatctttttcgattatttcgcaaggtcgggttgaagcaattttcaacagtaaaccagaagatcggcggaatattattgaagaagcggccggtgttttgaaatataaacaacaaaagaaaaaggctcaatctgaattagatcaaacagatgaaaatttgagtcgggtcaccgacattcttcatgaactacggggacaagttgaaccgttgaaggaacaaagcagtattgcgcaggattacttggatcaaaaagcgcaatatgatacgttgcaccaacaattattggtgattgaaattgatcaattagtggctgatcaaaagacgtacaaagaaaaggcgcaaacccttgcgcaagcgttgcaagagattgaagcggacatcgctaagacgacggctgcccaaaccgagaatcaggcaaccttagcccagttggaacaacaaatagaacaagataatcagacgttgttagaaaagtctcgcttagctgaaaatctattaggccaagagaacgtttcaaaagagcgcgctaattatacggatgcgaaccgccaaagtttagtcgaacagatcgacacattaaaacagcaattaacggcggaacaagccaatcaatctgaattaaaggcaagttatgaagaaaaggtgacggcattaagggcgttgaagacggagttaaccacccttaaacgccaagcgtctggtagtgaagcggaactgaaagcgaagattgaacaaattcgtcaagaatacatcgatcagatgcaagcccaaacgaccaatcataatgaacaacaatatttagaaaagaacttgttacaaactaaaacgcaacttgcacggcaagatagtgcagtcgatgagacatcgacgcaattggcacaaaaaaaggcagaacaagcggcccaaaaagcccaacttgaaacactcaaagcgcaatacgaaacgttgtccaatgagttggccgaattacaaacgcaaattaacacggaccaagcggcttaccaaaatcaacaaaatagttggttccaagcgtctggtattttacaaaaagcgaaagcaaaacaagccagtcttgcggaattaaatgatgactacgccggcttttatcaaggggttaaggctgtcttgaagcaaaaacaacagttccctggtttattaggggctgtagcggaattgatgcaagtgcccagtgagtatcaacaagcgattgaattagcattaggcgcacagctacaacaagttgtgacacgggatgaacagacggccaaacaagcgattgagtatttgaaaaccaatcggattgggcgggcaactttcttacccaataacgttgtcaaaccacgtttactaccaagtagcttagttcaccaattacaacagcagcctggatttatcggaattgccagtgagcttgtgcagtttgatgaacaagtgcgaccggtgatgaaccatttgatgggcaatttgattgtcgcgactgagttggagccggcgattaaattgagtcaattgacggggcatcgttaccgaatcattacgttagcaggggatattttaagcccgggtggttcgatgactgggggccataataaccgacaaaacaatggtgggctacttgcgcgtaagcaaaccttgactgatttagaaggtcaaattgccaagatgcaggtcgctttggatcaaaagcaagccagtgtccaagccgcaaaagctcaattaacggcacgccaagcagaattaaatacgaaacaagcggcattggaaaccgctaagaatcaatatcaagctgcccaaaatacgttagccttgactgacgaacgtttgagtcagtttgaacggcaacaacaagcaaccgattatcaagtgcaacaacaacaacaagcttatgaggcagatttaaaacgccaggcagaattagtggcagccgaagctgaaattgttgcgtcgattgcacagctgcaagcagatctcgaaacagctaatgagcaattacaacattttgatgagagtcaaaaacaaattgcgcaacaacaaacagccctcgaaaccaagttggctgtcgctcaagctgaacaaaagaatgttcaggagaaattaacggttgctactcgcaatagcaacgacctggcagcccagttgaaggccagtcaggataaactagctgcgctaaaacaagcggatcaagaagacgcttcgagtcaaaaagaacgacgagcactgctaaaggcaaccaatgctttgattgagaaagtccaagcgaagttagccactgaacgcgcgcaaaaagaaacgctgaaggcggaacaacaaacgcttcaagccaatgccacacgcgtctaccaattacaaaaaaatagtttagctgagcaagaacaaaatgctgtcgggctcaaccgggttaaaattaacattgatcaacgcttaaatacattgagcgaagattaccaattgacttacgaagccgccaaggccgctttggccgcatcagacttaaccgacgatcaattgcggtctaagttgaaattattgaaactcggcttagctgatttaggaacggtcaacttggcggccattgatgattatcaacatgttaaagaacgttacgatttcttgatgcaacaagatgccgacttgatggacgctaagcgccaattattagcatcgatggctgaaatggatacggaagttgaaaagcggtttaaggaaacgtttgaacaaactgccgctgcttttgaaaccatcttcccgatcatgtttggtggcggccatgccagtttaacgtttacggatccaagcgcactattaacgagtgggattgacattattgcgcaaccacctggtaagaaactacaacgcttgagtcttttatctggtggtgaacgcgcattgacggcgattacgttattgtttgccatcttaaaagtacgcccagtgccgttttgtattttggacgaagtcgaagcttcgttggacgaagccaacgttgatcgtttcggtcgtttcatgaaacgttatgagagtgatacacaattcatcgtgattacccacagaaaagggacgatgacccaagccaatcgcttatacggggtgacaatggcggaatctggaatctcgaagattgtttccgtttcattagaagaacacgcaacagcctaggaggaaaaccatgggattatttgatcgtattaaaaaagcattctcagccgaaccagaaaaagaaacaccggttgaacaagaccaagcgataccggaaacaccggttgaatcagacgctacgccggttgaatcgcaaacccctgcagaaactgcggcagctgagaaaactgaaaccgatgaaccagccagtttagcaactgaagatgattcagaaacggtatcaccgcttgacacaccaacggcggcacccgtaaactcagaaccagaaccagaaccagaaccagaaccagaaccagaaccagaaccagaaccagaaccagaaccagaaccagaaccagaaccagaaccagaaccagaaccagttgaagcgtcggcagtaactgaagaatccgatgcgattgaagaagtgccggaaacagaagcagtaactggcgacatgcaagctgctgaaacgaagaagtatgatgatggattagaaaaatcccggctcacatttgggcaacgcttaaatgcgttgttcgctaactttagaagtgttgatgaagcctttttcgatgatgttgaagaaatgttaattgaagccgatgttggctacgaaacagcgatgaagattgctgacgaattacgtgacgaagtgaagttgcgtaacgttaagaaaccagaagcggtttcacaagcgattgttgaaaagctagttgatttgtacggtcaagaaggccaagcagaagataatcaattgcatttcgctccacaaggcgaattaactgtcttcttattcgttggtgtcaatggtgcagggaaaacaacctcaatcgggaagtttgcccaccaattagaaaaagcgggtaagaaggtcttattagcggctggtgatacctttagagcgggcgccatcgaacaattacaagaatggggtcgccgggataatgtccccgtggttgctagtgcagcagggagtgatccagcgtcagttgtctatgacgcggttaagcgcgctaaagaagaacaattcgatattttattagttgatacggccggtcgtttgcaaaacaacgtcaacttgatgaaggaattggaaaaagtgaaacgcatcatcacgcgtgaagtaccagctgcaccgcaagaagtattgttggtcttagatgcaacaaccggacaaaatgctttagtccaagctaaacaattcaagcaaacaaccgatgtgactgggattgtcttaaccaagctagatggttcggccaagggtgggattgttttagccgttcgcacagaattacacttaccagtgaagatggttggtctaggtgaacaaatgaacgacttacaactctttgatccaaaccgctttgtttatggcttattcaaggatattattgtcggtgatgggccacaaaaaacaactgatacagacgtcagtcaagcgattaaatagcaaaaaggctaggacaaataatttgttctagcctttttttagaagaaagagagattaacagatgaaaattgtgttagcaccagattcatttaaaaatgctgttaccgcaaaagaagcggctcgtgcaatgcggaaaggattcgaaaaaagcctaccaagcgcgtcctatgtcgaagtgccaatggcagatggcggcgaagggactgtcaaagcgcttgtcgatgcgaccaatggccggttcttaaccgcacaagtgcaaaatgcattggaccaaacggtatcagcacaatatggcatcttgggtgatggcaaaacggcggtgatcgagatggcagctgctagcgggattcagtatgttgatgcgcaaacgcaaaatccgttgataacaacgacttatggtaccggtcagttaatggcagccgcactagcacaaggtgtgcaaacaattgtgattggtttgggcggcagtgcgaccaatgatggcggtgctggaatggcacaagcacttggggtgcgtttgttagatgttgacggacaggtgttaccactgggcggtggggcgcttgcgcgtttagcacggatagatacgacgcatatgataccggcactatcaagggttaaggttgtgattgcatcagatgtcacaaatccgcttgtcggcccgaatggcgcatcagccgtgtttggtccacaaaaaggagcaaccccagcaatggtcgcgcaacttgatcggaatttaacgcactttgctgcggtgattgaacgtgatttagggaaatctgttgcgcaaataccaggtgcgggtgctgctggtggcttaggggctggtttattggcgtttacggatgcgcaggttcaacctggtgttgagatggtcgtgtggcgcaaactgggttaactgagattttccgagatgcggatatcgtcgtcactggggagggcggaatcgattttcagacacaatatggtaagacgccaattggagtcgccaaagcggttaaacaagttaatccacaggcgacggtgattgcgattgccggatatattggagcggggattgatgtgctttatgaattaggaattgacagtattttctgcacaacacctggcgcaatgtcattagcaaaagcaattgaagctactgaagttaatttaacgcaagtcagtgaaaatatcgcgcgattaatcgctaaacaacattagaaaagaggaccgacaaacgtgtcgatcctcttttttagcattaagctgttttggcttttggttcgcgtcccaaaatcacttgggcgataattaagacgacataggcgattaaaacgccacctagtagactgttggttgcggttgctttaaccaaccagtattcttgccaagcgtgattgttgaagacccaccagaataatagcccgaataataaggttaagatgtttaaaatggcgaagaaccaaagattaccattttccttgttctttaaatagacgactgagaagattaagttccaaatcccccaaccgattaatgcgaatataacgccccaatagataattgttgctgccatcatacaacctccatagaaattccaatttaagttatgaaaaagcttacagttctattttagcatgatttttcgtttataccagtgaaaagataattaatgcacaaacttctagttaaatcgcgcaataaaacgttgactaagcccgttaaaatcggtactctaatacttaggtcaaactaagtctaggaggcgtcaaatggaactcgcacaaaacgcacgcatgaattcgttgttcgaattttatggcgcacttttaacggcaaaacaacatagttatatctctttatattatggggatgatttttccctcggtgaaattgctgctgaatacaatgttagtcggcaagcggtctatgacaacattcgccggactgaaaaaatcttagagggttacgaagaaaagctacatctttaccgtaattatgaacagcaaaatgccagtgcagatacgctacaaaagtatattcaagcgcactatccagacgatcaagaactgatgcgcttgttggctgacttactgaatttaaccgaacaataattaacttaaaggactgataaaaaatggcatttgaagggctaacagaacgactacaaggcgcattgagtaagcttcggcgtaaagggaagattaccgaaacagacgtcaatcaagcgatgcgcgaaattcggctggcattattagaagccgacgttaactttaaagtggttaaagactttattaaagtcgtcaaggaacgcgccatcggggcagaagtccttgatagcttatcacctgcacaacaaattgtaaaaatcgttgatgaagaattaacgaagatgatgggtgaaacggctgtgccgttgaataaatcaccacatattccaacaatcattatgatggttgggttacaaggggccgggaaaacaaccacggccgggaaattagcaaaatatttaatccaaaacgaaaaagcacggccattgatgattgccgccgatgtttatcggccagctgcgattgaacaattgaagaccgtcggcaagcaagttgacgcacaagtctttgaaatggggacggatgtcaacccagttgaaatcgttcgtcaagggttagcacaagcggccttacaaaagaacgattacgtcttaattgatacggctggtcgtttacaaattgacgaagccttgatgcaagaattggctgatattaatgagctagcccatccaaatgaaatcctcttaacggtcgatgccatgactgggcaagccgctgtcgatgttgctgaaggctttaacagtcgtttagatgtcaccggggtcgtcctaaccaagttagatggcgatacacgtggtggggcagccctttcaattcgcgccgtcactggcaaaccaattaagttcactggtcaaggcgaaaaacttgatcaactcgacattttctatccagaccggatgagtagccgaatccttgggatgggtgacatgttgagcttgattgaaaaagcgcaacaagattatgacgagcaaaaagcagctgatatggctgaaaagatcaaagaaaatagctttgattttaacgatttcttggatcagatggatcaattgcagagcatgggacctttggaagatatcatgaagatgattccagggatggctaataacccacaactcaagaacatcaagatggatccgaaagacatggcgcatatgaaggccatcgttcaatcaatgacgccacaagaacgggaaaatcctgacttattgaatcctagtcgccgtcgtcgtttagcggctggtgctggtcgcccaatcgttgaagttaaccggatgatcaaacaattcaatcaatcgaaaaagatgatgaaccaaatgtcaaagggcaactttaacggcatggaaggtttaatgggcaacggtatcaagggtaaaatgggtaagatggccatgaattcaatgatgaaaaaacaaaagaaaaacaagaagaaacgtctcaaaaacgcgcgtcgttttaaatcttaaaaaaatttgtcctgtaaagaaaaaacactttacacggcgtttgaaatttggtatattatgacatgttaaagaattaataggaggtggcattaatgtcagttaaaattcgtatgaaacgtatgggttcaaagaaacgcccattctaccgtatcgttgttgcagattcacgttcaccacgtgatggtcgctttatccaacaagtaggttactacaatccattaacagaaccagttgacttgaagttagaagaagaagttatcatggattggttacaaaaaggcgcacaaccttctgatactgttcgtaatcttttatcaaaacaagggattatgcaaaaatatcacgaagcacgcttcgctaaaaagtagggattcgttatgacagacgtgaaggaactaattattgcaattgttcagccacttgtcgaacatccggaagacgtcaaattgactgaacatgagacagaacgttttatggaatttgacttacaggttaatccaagtgatatcggtcgcgtcattggcaagcagggacgggttgcacagtccatccgtaccattgtctatagtgtgaaagcaccataccaaaaacgggtccgtttaaatattgtagatgcctaacaaaaacgtttaaatgaagcagagatgttttatttaggcgttttttgtcgattaaggagaaattaaatgccagaaaaatactatcaagttggtaaaattgtcaatacccacggcatccgtggtgaagtgcgggtcattgcgacgactgactttacggattcacgatttaaaaaaggcgtgcaactggccgtcgaaatgcccaatggccttgttgatgttaaagtggcggcaatgcgccaacacaagcaattctatctattacagttcgaaggaatgggcaatatcaacgatgttgaacagttcaagggccataatttaaagattgctgcaagtcaacgcgaagatgatctggaagatgatgagttttactacggtgatattataggcttagaagtggttgaagaagccgatgggaccagctatgggaaagtctcagaaatcatcgatccaggtcccaacgatgtctgggtgatcaagcgccgcggccgttcagacttactcttaccatttttgaagtcagtcgttaagaaaattgatattgaagcgggtaaagcctacgttgaagtaccagaaggattgattgataatgaagattgatgtcttaagtttatttccagatatggttcaaaatgggttatcccaatcaattatcggtaaggcaattgatcgtgacttaattgatttagaagtgacggatttccgtgatttttcagtcaataaacacaattcggttgatgatgcgccgtatggtggaggtgcggggatgttgctccgaccacaaccgatttttgaggcgatggatcaagtgaatgccaagaatccggggcacaaacgggttattttgctcgatccagctggggtaacgtttaaccaaaaagttgccgaagaatttgctcaagaagaccacttggtttttatctgtgggcattacgagggctatgatgaacggattcgcacgctagtcactgatgaagtctcattgggcgatttcgtcgtcactggaggcgaattgggcgcaatggtgatgattgatgccatttcgcggcttgtacctggcgtcttggggaatgaacaatcagcggttacggattctttttcgaccggcttattggaacatccacaatatacgcgaccaccagaataccgcggtttaaaggtacctgaagtcttgatgaacgggaatcataagctcattaacgagtggcgcgagaagatgtccttgaaacggacatatgaacggcgtccagacttactagagaagatgacgttgaccaaggatcagttgcactggttacaagaaattaagcaagaagcggctgaaaaataaggcttttattctcagttgaattatgctaaaattaaaaattgtgatgattagtcacaaaataacggtattccgctggcgcaagacgttaatgaatatctgtggaaaaaggagagattcaaaatgaatccattaattcaagaaattactaagtctcaattacgttcagatattcctgacttccgtcctggggacaacgtacgtgttcacgtgcgtgttgtcgaaggtactcgcgaacgtatccaattattcgaaggtgttgttatcaaacgtcatggtgttggcgtgagtgaaacttacacagttcgtaaaatcagtagcggtgtgggtgtggaaagaactttcccattacactcaccacgtgttgctcaaatcgaagttactcgtcatggccgtgtacgtcgtgctaagttatactacttacgcgcattacgtggtaaggcagctcgtatcaaagaagctcgtcgttaagatgacattaaaaaaggccgactcattacgagttggtctttctttatgtggattacaaagttaggtgatgacagatgaatcaatggatctacgttgttttatatcaagcaaacccactttattatgataaaagtaaaatgatccgggcgtttagttcggaacaacgggcccaagaatatgtggcgttgctcaatgagacgccatatgcgaatcaatcactaaaagagggccattatacttatcaaaagttgaacttaaactaatctaataaatgccacttataaggcgcaatctgatgcttctgcggagtatgggattgtgcctttttgggttgtggcactttcttgagggtcattaggagtgcaagtagtggttctaataatagaataaagacggtaaatccaagaaatctagctacggcgtagaatgcttcaggcgcaagtgtgagttgattaaagaaccgttcgcagcggtggttgaaggcgtttaatttttgttcactgccatcacgatcgactgcgtggtggacctttggatgccgacaaacttcaaagcggattggatttttttgatgattgctagaaaagcgcatgcctttatcgaaaaagtaagggcttacaaaaggcagtaaacaaagtaccaataaagatagaatcgcagttaatcgtttcattactagaacctcttttgttttaatttcaaactaattataccataaattaagtgggttggcgcataaaaaaatagccctccgacgaggactaagcaggtgttcgataatggaaatgatagactttaaatgaaatgatcaagctaaccaccaacaagaaaagggcaactagtaatagattagggactaaaatcaagatgatgtaagcgacgattgcacataagtatgccagtaaaatcaaattctgatcgagtgataataaataagcaacaatatgcaaaataatagcaataatgcacaaccaccatactttcgccatggcatccatataagtggggatgaatttcgtaacgtgggggttaaccactagaatgatcaaagattgtaaaaccgttacaactaagaaaattaagttgaataaaaacggtagtttgcgataagaaatcttcatattaataaacctctatcatttaagattctttaagtataacgaatttttttataaaaagaaatatgattcaataaatttaataattggccaattaacagggagaattgcgttattagcttcggattgatacaatcaggttaatttaaaacgagtaggtgatttgatgaatagtatccatttaatttgtttaggtgttcaggatttaaccgtgtcacggcagttttaccaagcactcggctttcaagcgccgaatttagaaaatgctgagacaatcgtctttttcaataatactgggaccaagttggaattgtttccgtacactgcactactagccgatattggcttatccgcagataatcatccatttccaagaacgttcaacggcgtgacccatgcctttaatacgcatagtcaagcggaagtcgatgcaacatttaaaacagctctcgctaacggggccacgctcatcaaagcgccagaatggggcgagtggggtggctatagtggttatttcagtaatcccgatggttactattgggaagtcgcttactcaaaggactggcaatttgatcaagatgggatggtggtgatcgaatagaatgtgggcgcacgtaggtttttttgcgttttacgctgttcagttctttagaagtctgttataatgaataacgttctggagagttggcagagtggtaatgcaacggactcgaaatccgtcgaaccggcttataccggcgcgcaggttcaaatcctgtactctccttaaataagcgattttagaacacttttaagtgttctatttttttgtcttaaagtgctaaaaatgttgatacaaaagggataaggaagatttttttatttggcaaattctataattaatccgaacagaaattaaaaagcccaaagcaatcacttacaatggtagtagctaattccaaccaatatagggagtgattactttgggtacatctactttatcacgttttcaacgtggcgcactagcacaactggtcaatgaggggaataaatcttaccaagtaatggctgacgccttaggcgtcgccaaagctacgattagctatgagttggaccgagttaaaccttatgatccagaattagctcagcaagatgcagatcgcaaaaggcggaattgcggtcgtcgttcgatgctgacggcagcattagcgactttaattaccaatcacttacgattaacctggtcaccagaaaccattgcggccgcttataacttgagcactgtgtcaatttataattggcttaatcgtggctggctccccttcaaattgactgatctacccaatcggaatgtccgccagcaccgagtgagcgaaaatcgtgggaaatttacaagtgggacttccatcgaacaacggccaacaactgttaatcaacggttagcttttggtcattgggaagtagatacggtgctttctagtcgaagtgagtcacgatcatgtctggttacattcgtagaacgtaagacccgacttctatgggccatcaaagcccctaatagaacggctaaggctctaaacaccgcctttggcaagtttatgggggccttcggtccccaagtaaaatccattactgttgatcatggtaaagagtttgccaattatcaggccttagaacaggattatcagatcaaagtttatttttgccatccatattcaccatgggagcgagattccaatgaatattttaatagacggttacgctggttcttcccgaaaaagaccaattttagccaagtaacgactgatgagatcctagcagtacttgaactaattaatcaacgaccattaaaaatacatcatcaacagactgccattgaaagattccgggcttgttcggattaaacttgtaatttgccggatcaaacaaatattttttatcgacgagatattggtaagaactccatttagttcaaaaaggtagaagtaagacttcgtttgaaatattacttctacctttttatttggatcgacatcttagaactttgagtttttgaaaaatttatagacatagatatttagagtattttttattagtcattgaaactattgaaaatagcgttgcatagaacaggaaagaaaggtatgatttaagaaattggtaatcttattggaccagttaataaaaataagtggttttctaattttaaaatgttgatctaacagtcttttcttagtgtactccccatgtatatggggatgattcctgctgtccctgaaacttttgccaatttagatggtactccccatgtatatggggatgattccctaactgtccatcggaaattacttgattcatagtactccccatgtatatggggatgattctattcaaaaacgtaccattgatttagtagatcggtactccccatgtatatggggatgattccaatatttgtgtctgggatttcgttgccgttcagtactccccatgtatatggggatgattccgttgcaatgcttaaaacatcgtaagtgtgtcagtactccccatgtatatggggatgattcttaactgatacaatcgcagatatcaactatgttgtactccccatgtatatggggatgattcctgtaaacaagcgcggttcttataaaactgatagtactccccatgtatatggggatgattccacgttttatggttatcgggtgtaataacccacgtactccccatgtatatggggatgattcctgacgagaacattgctaatggattgtaacctggtactccccatgtatatggggatgattctaataaagccgactaccatatcaatcagtggcagtactccccatgtatatggggatgattctcaaattagggttcttaaccaagattttagacagtactccccatgtatatggggatgattcttaaacagcaagtttgaagtgataattaacactgtactccccatgtatatggggatgattctggcgagtccatcgaatttgaaagcgcgaagaagtactccccatgtatatggggatgattctgtcatgcttaattcctccaatttaattaattcgtactccccatgtatatggggatgattcttgttcatacttcatttctgatttaactaagcggtactccccatgtatatggggatgattcttgatattataactacaatctaataataagatagtactccccatgtatatggggatgattccgttagttatcatggtgggtggtacattataatgtactccccatgtatatggggatgattccggcaaggaattcgcaacagcaatcaaaacaaggtactccccatgtatatggggatgattctcgtaaaaacgttcccgtctattgctgaaatgagtactccccatgtatatggggatgattctatcgaacaaccttcgtcaaggttaccaacacagtactccccatgtatatggggatgattctatttttaccgtcctttttagttataattttgggtactccccatgtatatggggatgattccagcgttacattgtatgtaccaaaagagaataagtactccccatgtatatggggatgattccaaatataaagcgttataagggattgtgagttggtactccccatgtatatggggatgattctagtctaatgataatatatatctaatcaataaggtactccccatgtatatggggatgattccaaaacggcaacaacggctcagaccctagcgcagtactccccatgtatatggggatgattccaatattacaattcgataatattcatttatatagtactccccatgtatatggggatgattctgccattccagacgcttgatgtggcagacttaagtactccccatgtatatggggatgattctgggctcgtgtggctcgatgataaccagataacgtactccccatgtatatggggatgattctaaaaggtgatccagttccagcagaacggccgagtactccccatgtatatggggatgattctcagaccagcagactccatcagtcaatcagaccgtactccccatgtatatggggatgattctggtactttgacacgtattacaaaactgacaatgtactccccatgtatatggggatgattccttaattagtttagtgcgaccgcgactagccttgtactccccatgtatatggggatgattccttatcagacacattaatgccaatacctaactggtactccccatgtatatggggatgattctaagcgtggcgcaattccacgcccaccatttcagtactccccatgtatatggggatgattcttgtccactagtgataacagcatggttgtccgtgtactccccatgtatatggggatgattctattcatcgcaaaaattcaataatgcttttaaggtgttccccatatacatgggatggttttaattagggccaagtgctcttttttatcataattttttcagaagtgaaattgtaccgtaaatagatttagtcatgagctaatttgtaatgaggttagatattagaaagtaaattttcatttcttacaagtctaactatattaatagtggcataataaagataacgattacattgccgtttgcgtagatacatttgaaagataatctctctaaaaaggggaaatattaaatgtcagtaaaattaacgagtagagaaactagtttatgggcaaaaaaacatgtagatgatggggaaatgttgtggcttccattagttgcccacttagtagattgcagtcatgtgatgaattggcttttttatcattggttaaatgccggtcaaagagaattgttaactcagtcggtttctgaagaagacatgcaaaagctaattaaatttttgggattctttcatgatattgggaaagccacaccagcttttcaaacaaaaaaatcttacgataataatgcctcgcttgatgaagagttgattgaacgcttgaatcgaaatggtttttctgaattacgagtatctggattatcatctccacaaaaatcacctcatgcattagctggagaagcaatcttagaaagtgatgcatttaatattcctgcttccgtaggggctatcattggaggtcatcatggtaaaccggctgaaaaacataatctcagaattcaattggaaaattatactgccaactacgatcaagttgatgggcatgttaaagatcctattgaggaagaacgtcgacaggaagaaaaacaagcttggcaagatactcgacaacggttatttgattatggaatgaatttagctggatatactgaggctggtgaaattccagaggttggacaaccacaggcagttatcttagaaggacttctgattatggcagattggctatcttcaagtgagtggttgaatgaagatcgatctaaacctctgtttccactaattgggcttgatcaaggttatcaagacatagatatgacaagtcgatttgagaatgccattttaacgtggaagcaatcagacaaatgggttccacaaagggtgatactgaatgataatactaatccatattttaatcattggggatatactccacgcccggttcaattagctatgactcaagcaattcaggctacaactgatcccggacttgtaattgttgaagcgggtatgggccttggaaaaacagaaatatctttaattgcagcggaacaacttgcgtataaaactggcagaaatggattttttatggggttgccaacgcaagcaacaaccaatgctatgtttacgcgagtgcttgagtggacaaaatttttggctgatgatgaaggaaaaaaattacaaattgatttgatgcagagtaaacgacaatataattcagaattcactaatttgccagaggctagcaatatttatgagcagagtgaaaatggcaagcaacatcaaactggatcagtggttgttaacagttggtttacaggtaaaaaatcaattctgacagattttacagtaggaactattgataatctattacgtatgggactaaaaaagaagcatctttttttacgtcatcttggattcagtggaaaagttgtcgttattgatgaggtacatgcgtatgatacatatatgtctagttatctctttaaagctatgaactggttaggagcttatcatgtgccggtaattattctctctgcaactttgccagttgaaaaacgaaatcagctggttaaagcgtacttaaaaggaaaatatggtttaaactatcagaatcgattaattgttaaagatggatggaagacaacgcaagcttatccgttactgacaattttggacggacctgaattaaaacaactaactaaatttgatcagaagaatcaaaaatctactcatttgcatgtacaacgtttaaacgtgaatgatgaagaattggttcaagcagttacagataaaataaaacagggcggagtagctggtattattgtcaatactgttaaaagagcacaagttcttgccaaagcatttcagcagaatcaaactatgggcgatactcccttgatggtattgcactccgcattcttagcacctgaaaggtctaagcaagaggaaaaattgcaaagacttattggtaaagacggtcatcgcccacacaaaatgattgtgattggaactcaagtattggaacagtcgcttgatattgattttgatgttttatatacggatattgctcccattgatttgattttacaacgtgctggtcgtttacatcggcatgatattcaaagacctgaaactttgaatattccagaattatttgttatgggaattcaagccccatatgaatatggcgatgctaatgaagctatttatgaaaagtatcttttgatgaagactgactattttttgcaagatacggtaactctaccgaacgatatttccaagttagtacaggaagtatacgatccaaaaacggatgatttaattccagaaatcggagaatcgagaattaagttagataaagatcaagcacaagaaaaacagcgttcaaatgttttccaaattgcggcaccaaaatttagacttaaatcgactattcatggttggttagattatgatttccgtaatttaaataaagatgaacaaagtgctaatgcggcggtaagagatattcaagaaacggttgaggttatcttgatacaatgtacagcaaaaggacaatatttagtggatggacggtcattaagagacgtttcagatcgtgaaatatctgaacaagtaattcgtctaccaatggccattacgcctaatgctaccgtgattactaaagttataaatgatctagaagataaaactgcagaatactttgataaatggcaagagagcccatggttaagtggggccttggcattgccgttggatgataatttatcagcaactcttggcaactggcgattaatgtattcagaagatttaggattaaattatacaaaggaggatgagtaaatatgatgagtcagagctttaatttgacaacagatccttggattaaagtgatacagactgatacaggacgggagaagtctgtatcactgattgaattttttagtcatgcacaagactatcgtcaattggccggagaaatgcgctcacaggatttagcaattatgcgttttttgttagcaattttgactacagtatattcgcgttataatgctggcaatatgccatattcttggattaccgtggattctgacacaatgcaagcaacagatgttgatgatgatacagatgctgaggatattaatgaagatttactcgatacgtggaacaaactctatcgagcaggaaaattttctaaaattgtgacagattatttgaagtgttacgataatcgctttgatatgtttggtgatcatcccttttatcaagtgacgaccgctgactatgacgctctagttcctagtaataaacgagtcgaaaaaggaaaaggtcaggtactagttaaacaacttaatcgacgtatttcggaaagtgggaatacgccatcaatttttgctccaaaaacgggcgaacggaagaattcaattgatattgatgaacttgtgcgttggttgattacttatcaaaactttacaggtgtaactgacaaaaccaaaattgagacgaaagaaaagttttccaattctgcgggttggttgtatcggatcaatccagtttatgcccaaggacagactgtatttgaaactctaatgttgaatctgaaattaggtggtgaacaagtagacccgttagccttacaaaagccagtttgggagtatgagattcaagattacattgctgttcgtaaacaacaggtggtaccggataatctagcagagctttatacaacttggtcacgaattcttcatattgaatggcaagataataagcatccattaatttttagtgcagggattccaatttttgaagctacgggtgcttttattgagccaatgacaacgtggagagtagacaaaaaaacaggggaatatcgtcctgctgttaagagtcttcgctcgttgagtatttctatgtggagaaactttggtaattacgttgatgttcacagcaattcaggacaattggaacctggaattgttagttggttgcatgatataaaagatcaagatacatcagtcattgcagatgatcaattgttaacattagcttcaacaactctgatcagcgatggtaatgcgacctcacaggctccagcggttgaagtagccgatgatatacgattacaatcagacgtgttgtttgatcctgaaattgcggaatattggcctgtacgaattgaagatgctatagatacaactcaaatgattggaacagatttttaccattttgcttcaacaattggtcaaatacgtaatgtggatgcgcgttcatttgccagcaatttaagtgccagtttttatcagaaattgaatgctccatttaaagaatggctatcccaattgactggtgatgatgacagagaacaaaaaattgaacaatggaaagagcaattagaagatattttaaatgacacagttcgtgatgtcatgaagtctagttctcctagggacgtcagtggtattgaggatgataaaggccgtttgttgaatatttttaccgctcgaagaagactaaattataatgttcgcatacatttagggcctcaggataaggagtgatatatcgttatgggaaaaatagaaaaggttaccgatagaataattcggagtctttggagagatggaaaaccagacaaagctgttttatcaaatgttcgaggtgctgctacgctgttaagtcggcaagcacagtctgtttggccagtgatgatggctaatctggatgaaaagatgttaagtcgcgatggtcgtcccacttatgcggaaacggcagtatatgcagccattcgtttttatgcgattcatcaacaaggacaaacacaatttgtttacagttcagttcacggggatgatgagaataaaggagtgagtttatttaaagcgcttgctcagttaagaaatcaaccagatcgtcaagaagctctggatcgtcgagtgaaagcactcttggcaacaagtaatgtggctagtatgattcagtctttatctcatttggttagtattttaaaagccactaatccaacaattagaattgattatgccttattagcacaagatttatatgatgcacaatttggtgttgatgttgcgaaccaagttcatttgcgctgggggcagcagtactattggagcacgaaaaatcagaaaacaactgaaggggagaaaaactaatgaccaataatttatatttagacataaatatcattcaaactgttccatcatctaatttaaatcgagatgatacaggagcacctaagaccgctttgtatggtggtgttacgagagctcgagtttcttcacaaagttggaaacacgtcgtacgccatgcatttaaggaagatcatgtgacatttagttcacgaacaaaagagtctgttcaattattggctaatgagttacgtaagcaagatggttctcttgatgaagaagctgctttaaccaaagctaatgaagcttttaaatcagctggcatcaaggttgacaaaaataatgagacgggtgctttacttttaattagtaatggtcaaattaaaaaattggctcagtatatactcaataatgatgaactcgataaaaaagaaattaaaaaagttcttaagggagaccaatccctcgatttagctttatttggtcgaatggtagctgataatcctgaattaaatgttgatgccgcctcacaagttgctcatgcaatttcaactcatgaagtgattcctgaatatgattactttactgccttagatgatgaacaaggtgaagatactagtggagccgctatgttaggaactattgagtttaattcggccacactatatcggtatgctaacgtgaatgtcaatgaattagtacataatctgaataaagaagatgccatcgctggtatatctgcttttatcaaagattttgccctatcaatgccaactggaaaacagaatacttttgcaaacaaaacgcttccaaactatgtcatggttacgattcgacaagatacacctgtcaatttagtttcggcattcgaaaaaccagttgtatctaacgatggttatgttgaaaaatctgttgaacgaatagagaacgagtataagcagacactggattttgtagatcaaccgttattgacggtagctttgagtaaatacagtacagaagctagcaagacagcaacaaacttgtctgatctcttggaacaggttacgacggagttgacgaaggtggttgaggatgaaaatactaacgattagattgacgtcgcctttacaatcctatggtgatgaggctacgtttgaacggcggacaaccggagattatccttcaaaaagttcaattattggaatgattgcagcggctttgggttattcaagagaggatccacgaatctcgcaattgaatgatttgaattttgctgtacgaattgaccaagctggacaaatgttaactgattttcatactgttgaatggaaaaagaatgttcgcaaaattacttatcgcgattacatacaagatgcagtatttgtagttgccgtgggaagtaatgatgatcaacaaattacaaaaattcacaatgcactgcgtcatccgcattatcagttattcttggggcgtcgagctaatgttccagcaggagttcttctaatggaagaacttgacgataaaaaccctgtaacagttctggaaaatttaggttggcaagtttcaccttggtctcaaaaagtttatcgaaaacaaaatcctggtaaaatgtttcccaaagttgatatatatgcagatgcaaatttacttaacgatcatcatagtgtaatggttaaagatcgagtgggttcatttgatcaaagaaatcgatactttggttatcgagcaatgtcaacagaacgagttcaactgacatattcttgtatagcagttgatgaatcaacagaacatgatgcattaagtgcactttagaaaggggggtagtctatgtattatttatcaagagttgaagttgatgttcaaaatcgtgcaaaaatcaaagatcttactcatttaggtgcatatcataactgggttgagcagagctttccaaaggaaatagcgaccggagaacgtcatagacatttgtggcgtttggatacattagcggggaaaaagtatttattgatcatgagtgaatccatacctgattctgagtttttattgaaatatggtgttacaggaactattgtgactaaatcatacgatggattcttagacaaaattcatgatggtcagattatgcgtttccgattgacggctaatcccacacatacgattacacgtcctggaaaaaaacgtgggaaagttttccctcatgttacagttactcaacaggaaaaatggttggtagatcgatcagataagtctggatttgaattggtcaaacaagttggtgttaatgacttaaatgaaacgcagacgctcgcttttaaaattgtcgaacgtgattggccaatgttacaccgtaatccaggacgagccgttcgtctcagtcgagtaacgtttgaaggtctgttacgcgttgaaaatgcagagacttttaaacagactttagtaaagggaattggacgtgagaaagcttttggtatgggaatgatgactgttattccggaggcttaatatgtcagaaagaaaaatgggtgctaataagccagaaatttctgaacttggtcgtgtacaagatcgtatgacctttttatatttagaacatgctgatgttaataggcaggatagtgctattcaagtgacggatcaacgtggaattgtatgtattccagctgctatggtgagtgtcttattgttgggccctggggttaatgtaactcatagagctatggaattaattggagattcagctatggctgtagtctgggttggtgagcaaggagtacgtgcatatgctcatggtcgcgctttgaaccactcatcacgtttattacaagcacaagcaaaattagtttcgaatcaacgtactagagttgctgttgcgcgtaagatgtatcagatgcgctttcctgatcaagatgtttcggggttgtctatgcaagaacttcgtggcaaagaaggtgctagagttcgaagtgtttatcacaaagaatcaagaaaaacaaatgtaccctggaatcgtcgtgagtataatccagataattttgagtcgggtacaccaattaatcaagctttgactgcagcacatcaagcactttacggattgagttatagtgtaattgtggcgttaggggcatcaccaggcttgggatttgtacatacaggtcacgatttatcttttgtttacgattttgcagatttgtataaagcaaaaatctctattcctgttgcattcgaaatgactgcaaaatatagtcaagacgaagatctagcagctagaacacgattagctatgcgagatgcctttcgagacggtaaactattgtctcagatggtgactgatttgaaaaatctattaaacatagatgattgtcaagatggcgcagatttatttcaactttgggatgataaacttggtatgcagaaaatgggagttcagtatcatgatgtaacggcaggtgatgacgaatgattgttgttactttatctaaagttccgccttcacttcgtggtgacttgactaaatggtatcaggagattcaaacaggtgtgtatgtaggtaatgtcagtgcacgagtccgtgacctactctgggaacgtattttgaaaaatattgggactggtgaagcaacaatggcgtataatactgccactgaattaggctatcagtttcggacaacacgtaaggatcgacaagtggtcgattatgatggtatacccttaatgatgcatttaaagcaacaagaggtgccagttaaacatggattcagtagtgcggccaaattccataaagggatgacaatgtcacatcgacgtatgactaaatatcgaaaagatgtaaagcctatattatcaaaacctttggtggcacttgatttagaaacaactggattggatagtactaaagcagaaattatttcaattggagcagccaagataatgcccgacggacaattactgcaatttgaaaaattaattcgaagtgtggattcagtaccatccaaaattactgaacttaccggaattacttcagaacagttgcaaaaacagggtgttgagctttcattaggattagaggcattgtctgattttgttaaggattcagtcatcatcggttataatcttgaatttgatgaaaggtttttaacggaagcattgcggaaagttggaaaaaccgaatttactaactctacccacgatcttatgccaatagtaaaaacaactcaggagtttttagataactatcgtttaacgactgtcttggaagtatatcagatagagaatttagatccacatcatgcattatctgatgctcaagctacgttgtctttagcagagaagttaataaaaaacggcaaccttgtaatttgaaaatgcctatgtaaaggctttttttagtgtgctccccatatacatggggatgattccagcacgttcatggcacgcccaccttgcacaccgtgctccccatatacatggggatgattctggatcccgcacgattcttgagaaactgtctccgtgctccccatatacatggggatgattcccgaggcgctatcatcaattcaaaattcacttggtgctccccatatacatggggatgattcctgaaatagcgtcccgaacggccttaataatatgtgctccccatatacatggggatgattctaatagcaatacgaacattttcttcctcctagcgtgctccccatatacatggggatgattctaataaaactaagacggctgttatgaaagaaatgtgctccccatatacatggggatgattctacaaaaatatattatttcgggaatataagaaagtgctccccatatacatggggatgattctaatgctgaaaatgccggactaatcaatgctgagtgctccccatatacatggggatgattccaagtccagcgacgactgcagcaattgcagcaagtgctccccatatacatggggatgattctaacggatgggatggtattatcgctgttgctcagtgctccccatatacatggggatgattcccgctttggctgaatctaaaagtgcttgttcgtgtgctccccatatacatggggatgattcttaacaggcgacttcgcacagcttcaacaattagtgctccccatatacatggggatgattctagtatgagtgatagaaaaattgtactaacccagtgctccccatatacatggggatgattctggtacagacggtggaacttggatgaactacattgttggtaccactgataccacaaagagacattatgtggcaaccatcttgctggatgggttttcgcagcaaggtgtttatatccgccttgataatattccttcgacatccactattacattttcaaatatgaaactgcaattaggtttaaatgtggtggtctccaatctttctcaagccgtggatggtatgcgacttgatatctctaagaaaattgagcagaaggatctcaacggatatgcaacccaaacgtggacactggatcagattaagttaatttctgattcaattgcttcgttgaaaacaaaaattgacaatcttagtcaatgaaaacaataagaagtaacatccacagctataactgatgggtcaaaccatcacagcaacagacgatacaggtaagacagtaaaactaaagattacaggaatcagctaaaaagctagttccttttttttagtacaaaaatttaggagatgaaatatatatgtatggaacaccagttttactaccacacgcaggctttaccgattggcagtttgctatcgaacatatgggaagcaacactttactaaatacactatttattttaattattgctgatgtgattacaggaatagcaaaatcaatcatcactcatagtgtggatagttcgatcggcaaaaaaggattagcaagacacttcacgattattctgttggtcgcattgctttatccatggtcactagcgattaactaccaatggctaggtgactcagttttaagtttgtggacattcatgtatgcaacttcgattgtagaaaatatcggacaaatgggattgccgctaccgaagtttattaaagacaggctaaataaatttggccaagacatggaagattaagaaccaaaacaagaaaacgataacgtaaaggagataaataaatgaattttaatatcgataattcttacgaattaggagctaatgaaggctcatctcaagcaacaaacaataaatacattgtcctacacgaaacaacaaatatcggtgccaaagctaatgcaagctaggctcctatgtcaagaatccggacataaaagtacgaacaaatttgactttcaatttaaattacttaattggtagattgtaaaattaatccgaacgctgttcggacaaaaagatcagcttcctttaaaatggtgtttaccacaaacccatcttttaggagctgatcttttgtctagtataacctattccgaacgaattaaaatcgaaaccttttgtgaactagggctgtccaatatccaaatgggcgttcggctgaaccgatcaccgtcaacaatttcttatgaattatctcgatgtcaaccttatcaggctgaattagcacaaacagatgccgaatacaagcgatcacgatgtggtcggaaaactaagctgagcgatgagttaaagcaaaaaattctcaaccatttacgtctaagctggtcaccaggaatgattgctcacgaatttaaactagctactaaatctatttataattggctaaatcaggggagaattggtttctccttgaatgatctacctgaacatggcgtacgccaacggcgtaacgttgaccaacgatccaaatataatcaatctttggggcgatcaattgaacagcgtcccatgatgattaatcaacgtaagcgcatcggcgattttgaactagatacagtcgttggtcctcgtgggcatagtaaggcagttttattaactttaatcgatcgcaaatcacggttcctttgggcataccggttaaaagatcggacgacagcgactgttaatgaagcactaactaagttcctaaccacttttaatggtccggtgcacagctttactgtggaccgtggcactgagtttagtgggctagtatcacttggatcacaatatggtattaagacctattactgccatgcttatacgccagctgaacgtggtagtaatgaacgctttaatcggaatttacgttatttttatcctaaagggactcgttttgagcacattagtgctcaagatttaacgacgacgttactccaaattaaccagcgaccgcttaaaatactcgactggcaaacaccgtatcaggttatgctgacaaatttgtccaaaaattcggattaaatttgcaatctaccactctactagatagttttcgggcgggtcggcgtaactacaccatctttcaagttggtaaagccaccctactgcgggtgagtgatgtcatgaccttaaaaaaatcagatgtctataatccagacggttctgttaaacacacggcctttattcatgataaaaagactggtaaagcaaatacattatatttaaatttttaaattctattgtcccaatattgtcccagaagagtacagaaatactggtactacggtaaaatatagtcctaatataatcctgtactctccttactataatggaaaaagcaaaacagttattgttttgcttttttttggtattttttaacagtttccccttattataggataagttacttagttttatttgttgaaatatgatattattaaccttaaggggatgagttaatgacagataaacattattacggcaactacgaagtggttgaagaacgggaatcgcaaaaatatgttgcaacgattaaaatacataatatggttaaaaaagtcgtgatgcaagatgatgctctgcaaatgctcgcacaaaatgatgttttacccgaaacggtggttcataatattattaaagaaccaaatttgctgaaggaacaagtcatcatttctggtgctaatttggcccaatacttagattaaactcaaaaataagaggggctagaacaagtgaattgttctagcccctcttatcatatttttaggcttcactgatgtcagcaaaggtggcttcagtgacccgctgtaagtcttgcggattaatctgaattgagcggccaattttaccggatgagacatagatgaatggttccttttcagcctgttggtcaatgtaaatcggatagtgggattgttcccagattccaacgggcgtgttagcgccatgttcgtagccagtagtggccatgagctcccttaatgggaccatcgcaatttttttgttgtcagaaatttggcttaattttttttcgtctaaatgacaatcaatcgggacgacaccgacgattgggccggtactcttaccagagagcaccaatgttttataaataagatgttcatcgatatcgagatgatcggccttcatttgggcaatgttgtggacttcctctgttgggaattcaagttgggtgtaggccactttttgtttatctagaattttttcaactaatgttttggataatgcgttttgctttttcttctttcccataatagactcctttaatgaatagtgttagtttacggcaatttggtttaaaagtaaatttaagactgcaatgataacgtttcgttgtataataaaattacataaggagtgatgatatgttgtggtttaaaaaacaaacagaaaaggacttacagtcccacgattttacccagttagtgaagcatgcgcgtaacgatgaaatgcattaccaaaagattcaagcgacatttgctggcttgaaaaaggcatatcaccaaccaaaatcgaatcaattaccaaaaaaagactaagttcgcgttgttggtgacagtatggcatactatatgtaataaataacgggtgggtgacacgatgaaacgacaaacttggcatttcctcttttataaatcagccttcacaaaagaacagattgaccagttattggcttatttaaaacaacaacaaaattttggtgggtttccgattgttgaattaattggtgatggcgatagtagtgatattcggtttgtcacgatggtttttgatccgttggccccgattgaagcccatctacaatcagaaatggctaagtttatgttgatgcatgccattcgcccagatggcaacacgccagaagctgatatgcggctatatggtcgtgtgatggcagaatctgatgcagcactcggaattgagttccaacgttatgacgatcagagtatggacgttatttattggggtcagaaccaagcagcacattaagtagaattacgattgaaagtctgggacattttgttctgggcttttttgaatgattgctttagattcaagtcataatcaggtatgatgttaatacgttcaactttaaaattgacttaaataacgactaattaaaaggatatggtgaatataatggctgaaatggatatgttagtatttttcgatgcagaattagatgatttacaatttagtggggatatgaatatcaactgggacaaacaagctcgggcgattgaattggaattcacattaaacgtgactaaggaacaagcaattgccgttgaagatcaaaatggtgaattgaacgaatcggatgaaatcagttatgaagatgcgattttattcttcgatgaaagtaagatggacggctttgaatatgcagacaattatttagcagtgattccatttgctggtcgcaaggggttaaacgcacaagtcggtcggggctttttcaactatttacaagacttattagatgaaggcgaagatcaattagccgcttttgtgaatgatgaatcagacgaagaaacctttatcttaaactgggatgacactgttttccaagcaactgtcgctcaagcagatgatcaattagcgaaaaaatactacgcttaccctaaatactaagcaacccgcattaagaaggagacatgctacatggaatggacaaaagtaacggtcgctactgttaatgaagcagtggaagcaatcgccaatattttaacggaaaatggtgcggaaggaatccaaatcgaagacgcagccgattatgaacatttaaaggcaaagccagatcaaattattgatctagacagtattccccaccttgaaacgggtgctgcagtgagtgcctttttcccagaaacagtttttgtgccggaaaaattaccgttgattgaacaacgcgttgcccaattgactgactttgggttagcgattggttctggtaaagtgacattggcacaagtcgccgatgatgattgggcgacagcttggaagaaatattatcaaccaacgcggctaactcgctttttaacggttgtgccaagttggaccgactatcaaccgactgatgaacgcgaagcactgattcggatggatccggggatggcttttggaacaggaacgcatccaacaacccatctatccgtacaaatgttagaaatggttttacgcggcggtgaatctttaattgacgtcgggactggttctggggttttgagtattgcggctgcgcatttaggagtcaatgatattcgcgcctatgatgtggatcaagttgcggttgatgccgctaaggaaaattttgccctcaacccagtgaccgctggcattgatgcccatcccaacgatttgttgaacgggattacaacgaaagcggatgtgattgtggccaatattttagcagagattatcgtgcccttgattccccaagccaaggctttattgaatgacaatggacacctattactggccggcattattgcagataaagaagcacttgtccgtgaaacgttatcggcgaatgattttgttgttcaagaagcccttcatatgggtgactgggtggcattgattacacgccaaaagacggacgacgattaagaggagtatggcatgcaacgttattttattgatgaagcaattcaagtagaacaacaagtgaccttaacgggtgaaactgcacatcatatgctaaaagtgatgcggatgcagcctggtcatcgtgttgaattggtaacgccggatgaacaagcattcatcggtgaattaactgaactggatgcaactgacaaaacagtcaccgttacggtgcaatcgccaattacaaaatcagttgaattaccgattgagacgacgattgtatgcggcttgtcaaagggtgacaaaacagactggattgttcaaaaaggcacgcagttgggtgcacaccggtttattttctgtaatagccaattctcagtcgcacgctgggatgataaaaaacaagctaagaaagttgcgcggcttcaaaaaattgcgcaagaagcagccgaacaagctcaccggacgcatgtaccaactattgaatggcgcaacagtttaacggcggtcgcacaagaatcagcgacgattaaattagtggcttacgaagagtcagctaaagacggtgagcattcccaattagttcagagcttacaaacagcccaatctggggatcgattactttgtgtttttggtccagaaggcggcgttgcgcccaaggaaattgagatgcttgcggcggctggctttaagatggctggtttaggaccacggattttacgggccgagaccgcgccgttatatctgttaagtgcgatttcgtatgtgacagaattggctactttatagtatgatagatataatctttttacagaggggcacaacatgactaaatttatgaataatcgttatttaaaaatggattgggtacgctatttattagtggccattctcttggcggtcgttttaccgctagtgtttggtgtcttgcacatcgataaaacgtggcggattggactgctattcatggctgtcaatggttgcgcagcctttatgattgggtatcgtgttcaaaagacccatgcagcttggtatcacattttgtacctgccgattttatttggattgatggtggttgtgcgctacgcagattataactattggttcgttcctatttattgtttattaagttacttaggaattagtactgcgtatgaacgccgttaagcaaactgactcgacagttaattagttgagtcagttttgttgtattcagtacatttttaatcgagtaagaggaattggagtgaggcaggatgccggaagaaaaagtaatttcacagcaggaagtgctacagttatgtcagaaatacatgaatactgagcatcttgcttttgtccaaaaagcgtatgattttgcagcttatgtgcataaagaacaagttcgccaatcaggtgaaccgtatattattcatccaattcaagttgcagggattcttgctgaattgaagatggatcccgcaacggttgcttctggttacttacacgatgttgtcgaagatacgaatatcacgttaggtgatgttgaagagatgtttggcaaagatgttgcggtaatcgttgatggtgtcacgaaattaggaaaaattaaatataaatcacaccaagaacaactggctgaaaatcaccggaagatgttattagcaatggctaaagacttgcgggtgattatggtcaaactcgccgatcgcttgcataatatgcggacgttgaaacatttgaaacccgaaaaacaacgccgaattgctaacgaaacattagaaatctatgcaccattggctgaccggttagggattagtaagattaagtgggaattggaagatatctcgctccgttatttgaacccacaacagtactatcggattgtgcacctgatgaattctaagcggacacaacgcgaatcttatattcaagaagcaattgaagacattaaagactcaattgctgatttagatatgaattacgacatttatggacgaccaaagcatctttactcgatttatcgtaagatgcgcgaccagcataaacaatttgaagaattgtatgatttactcgcaattcgggttgttgttgactcaatcaaggactgctatgctgttttaggagcaatccatactaagtggaaaccgatgcccggtcggtttaaagactacattgcaatgccaaaggccaacatgtatcaatcgatccatacaactgtgattggtcccaaaggcaaaccgcttgaagtgcaaattcggacgcaagaaatgcacgatgttgctgaatatggggtcgctgcacattgggcgtataaagaaggcgttaaggaacagattaaggtggatgaatcagggcgtaaactcgatttattccgtgaaattcttgaaattcaagatgcttccgatgatgctgcagaatttatggaaagtgtcaaaggcgatatctttagcgatcgcgtttatgttttcacacccaaaggcgatgtttatgaactaccaaagggttcagtgccactggattttgcttatttagtgcatactgaggtcgggaaccacgctgttggggctaagattaacggcaaaattgtaccgttgaactatcaattacgtaatggtgatattgtcgagatgttgacgtcaacaagtgcgacaccaagtcgtgattggattaagctcgccttcactgcgcgtgctcggaataaggttaagcgctactttaaaaaagaagatcgggatgaaaacgtcgaaaaaggacggacggctgttgaacatctgttggtagaagatggttatacaccaaaagaacacctcactaaagccgagatagctgtcatcctaccgcattttaattttaatgccgaagaagaactgtttgcagcaattgggttcggtgaaatctcaccacagtcagtcgtcaatcgcttaacgattaaagaacgacgggcaaaagaagaaagtgaacaaaaagcattagaagctgagattctatcagcgaaggattcacaacaaccagggcctaaagcaaatggtagccatatcacaatcaaacatgaagacggtgttgttattgaaggtgtcgacaatgtcttagtgcacttgagtaaatgctgtaatccagtccctggtgatgatatcgttggctatgtaacaaagggacgtggggtttctgttcatcggcgcgattgtccgaatatcgttgatcgggcagatatgaacagtcgattgactgaagtcagttgggaaaataccaacgctaagaatgatcaactctatgatgcgaatttggaaatctacggctataaccgtggtggactattgaacgatgtcttacagtccttaaatgcacatacgaaacagctaaataacgtgatggggcggattgatcacgataagatggcggatattcatgtgacagtcggcattcgcaatacagatcatttagaaacgattatggaagccgtgaagaacatcccagatgtttacgaagtcaaacgggttcaaggataggagcgacttaatatgcgagtagtattacagcgagtgagccaagcaagtgtcacgattgatcagacgattgttggtaagattaaccaaggctttttgttattggtcggtatttgtgatgatgatactgaagctgatttagattacttggttaagaaaattagtcaattgcgcgtttttgaagacccagatggcaagatgaatttggcgttggcccaggttgacggtgccattttatcggtgtcacaattcaccctttttgctagcactaagaagggcaatcgcccaagctttactgcggctgggaaaccggactatgctaaacgcttatacgaacagtttaatcaaaaattagcagcgactgggattcgcgtcgcaactggagaatttggagccgatatgcaggtggctttggtcaatgacggtccagtcactatcctatttgatacaaaggagaatggataattaatgagttatcaaaatgcgatttgggatttcgatggtacattgtatgatacttatcctgttatgatgacggcgctcagtcaggtttaccgtgatcatcaagtcgcagtcgatcaatcgcacttataccaagcgattaagcagacttcaattaaacgggaactgcagatgcttgctcagcaaactaatgtttcatttgaacaattggatcgagaatatcatgaattagaacaccaattacaacagacgccacaaccttatccgggggcagcggcgattttgaaacagattagtgcacatggtcagaatttcttattgacccatcgtgatgatgctgcagaaaaatttttggcagcgcatggactagcggattattttactgaaattgttacgagtcagagcggatttgccaggaaaccggcgccagatagtttgaacgatttatgtgatcgttatcagctggataaaactaaaaccgtgatgattggtgatcgtgcattagatattgaagcagggattaacgcccatgtggcgacggcctatttcgatgttgatcgattaccaatcacggtgcaaccgacaatcacaattacgcaattaagcgcgttagggaaatattttttaaactaaaaaaagcggtgtcgacaaattgaaagagtcgacaccgttttttttggtttaaaggagtgtgatgattagaaaggataggtaccatgctgtggccatcacgaggacaaagcgccaccaactccgtagaaacttacgtaggtacagcgcacggtcgtagtaaaagcgcgttaagctccagatgattccccacagacagatagctaagcaaaagaaccagccagctttactgaaaattggcatactcagaaagatagcacttactagcaatggaattggtagccaattaatataatgaaaacgatgtttaaatagacgctgagtcaaccggtcgatacagtagccgagtgcgacacagacgggcggtaagcctgcaaagaaaagtgtcgtgctaaatggcatttaaatcacctcgaaagttaatagtctcattgtaccgtcttttggaaaagataaaaaggactgagttgcactttcaagtgattcggtgtaaactgctgataagaaaaaagtctaggtggtggaataattgaagaaacaaacaagcacgtttagtcgcattactaaaattttcgtttgggtaatgttaatcgccacagtgggctcagtcatttttggttcactcgctgcaactggcattttaaacttctaaaaattagattaaagtgagcaattttttgcggcgttgcttagaagtggtgcgacagcccaaaataagcttacttaattaacaagtgaaacggccatttcggttaacgaaatggctgttttttttggtcaaaaaggctagtaatataaatatcgtgtacaattggttccaaaatgataagattttggttttttttggcaaaatgtggtagaaagtgggggattgtggtagactaaaatcagttaaggtgggcaaaggggtgaatggttatgttcatgggcgaatttcatcacacgattgatacgaaaggtcggttaatcatgccggctaaatttcgtgaatcattaggtgcggaatttgtactcacccgtggcatggacaattgtatttttggttacccccttagtgaatgggaacagttggaagagaagttaaaaaaactgcccctcgctaaaaaagatacccgcgcgttcgtccgctttttctactcagcggcggtcgaatgttcccctgataagcaaggtcgggtgaatatcccagacacacttgctaaacatgctggtcttgaaaaagaatgtgtattaatcggggtctcaaaccgcattgaaatttggagccaggaaaaatgggcgagctttagcgaagaagctgaagagaattttgatgatattgcagaaaatatgttagattttgatttttagaaggatggtaaatagatgacagaaacatttaaacatcaaagtgttttattgaaagaaacggttgatgccttgaatgtgcaacccgatggcgtgtatgtagacgcaacattagggggcggcggccatagtgaatatttgttatctcagctgacgaccggtcatctttattcgtttgaccaagacgatcatgccttagcaagtagtaaacaacgattagccaaatatgctgaagcgggccaagtgacttttattaagagtaacttccgctatttaaaagcagcgttagcagaacacggtgtgactaagattgatggtattttatacgatttaggcgtatcatcaccacaatttgatgatgcccaacgcgggtttagttataagaaagaagccccacttgatatgcgaatggaccaaggggcggaactcagtgcctacaatgtcgttaatgagtggacctatcaacaactaattaagatctttttccgctacggcgaagaaaagttctcaaaacaagttgcgcggaagattgaacaacaaagagcagttgcgccgattgaaacgacaatcgaattagctgatttgattaaagaagcaattcctgcaccagcaagacgaaagggtggacatccagcgaagcggatttttcaagcgattcggattgcggtcaatgatgaattaggggcaattgaagattcactcgaacaagctattccattggtcaatgtcggcgggcggatcagtgtcattacgttccaatcattagaagatcgtttggtgaagacgatgtttaaggaacaagcaacgctcccagatttaccgaaagggttaccaattttaccagaagaacaaaaaacggttctaaaattagtgaaccgcaagccgattctaccaacagatgatgaattagaagaaaaccatcgtgcacatagcgctaagctacgtgtcgcagaaaaacaaaaagaaattgactagaaggattgatgatgatggcaactaacacggcacgccaattagaaacgccagtagcaccgctaaaaacgcagcctactgcacataaacaagcagttgcaagccagtctaaaaaagtggctttttcagctgttgaaaaattagcgacgtcagttattggaattatctttttcgcgatgttggttagtttgttaaccaccaaaattgcagttgttaatgcacaacgaggattagaaagtacgactcaaaagatggcccaagtcagcgctaacaataatgatttaaaacaggagatcggtgaattaacaagctctgaccgtctgaatgcttttgcccagaaacatgatcttaaactaaatgaaaataatattcggaacgtgtctaaatgaaatcagttaagacacgtaagagtccacggcggaatcgacgcgtttttggcaggcttttattgctaattatcgcggcgatttttctagttttcgccggtcgttttgcttacattgctgctactgggcatattgcaggggtggatttaacgaaacgatcacagaaaaaatacaaagctgattccgtgattcgcgcacaacgcggtacaatttatgattctttagggaacgttttggcacaagatattaacgcctattcagtgtatgcggtattaagtcacgattacgttggtcctaataagaagccgttatatgtaactgataagaaaaaaacagcgaaagttttgagtcgctatctaccattgagtgaagaaaaaatctataaacaattaacgccagctaaccgttcagtttatcaagttgaattcggaagtgccggccaaaacctttcactgagcatcaaacggaagattgaaaaagaacatttaaccggtatttacttcaatgagtcccctacgcggctgtaccctaatggaacattcgcatctcacgtcattggtatcgctcaatcaccaaaggacgaagacggcgctgatcaaagcctcgttggtgtaatggggattgaaaaatacttcaacaaacaattagcaggccaagatggttacaagaattttgcccgtgattcctatggatacacgatcaatcaaaagaaaaacaaagtaaaagccgctaaaaacggccaagatatttacttgaccttagattctcggttacaatcatacatggaaactttattaacgagcgtcaataaaaaatataagcctaagagtatgaatgccgtcttgatgaatgctaaaacgggtgaaattttggcggcttcacaacgaccaacctttaatgccagcactaaaaagggaattggcaagatttggcgagatacattagttgaagatggctatgaaccaggctctgttttgaaaattgcaaccttggcagctgccatcgactctggtaattacaatcctaatcagtattatcaatccggttcgattggagttggcgataagaaaattagcgattggcaaacgagtggctgggggatgattccgctgagtcaagcctttgcacgatcaagtaacgttgggatggtcaagcttgaacaagccatgggtcctaaggtttggaaagactacattcagaagtttggtttcttaaaaccaactggtattcaattacccggcgaaacagaggggacattgcaatatgttcggccactagatcaggccacaacttcatttggtcaagggattaacgttaatgtaatgcagatgcttcagatgacaagtgcgattgcgaacgatggcacaatgattagaccgcagattttatctgggattaatcaggatcatcaagtaaaaccaatcaaagctggtaaaccaattaaggctagcacggccaaatctgtcttacaaaatatggaagatgttgtttatcaagattatgggacgggtcaggtttaccaaattccagattataaagtagccgttaaaaccgggaccgcacaaattactggtctagacggtggctatttaaccggcgcaagcaattatatcttctctgtatcagggattgcaccagctgatgatcctaagtatattttatatgtcacaatgaaacagccacagaatatgacagatagtgctgaaagtattttggcacaggtcttcaatccaatgatgaaacgggcactggagtataccaaaaaggctgaaaaagacacacaacaacaagtaacagttccgtctgtgattggtcaatcaacggatgaagcacaaaagaaattaacggatttaggcctacaaaccgcttctgttggtagtgggaacttagtcgtccagcaattaccaaaggccaatagtgtgattttacctaaacagcgagtcattttaatgaccaatggggcaatgacgatgccagatgtcacgggttggtcgaaaaatgacctcttaaagctcgcgcaattaacaggtgttgagattgacatcaaaggtagcggatatgcttatcatcaaagcctagcggtcaatgggttgctagatggggttaaaaaaataaaagtacaattaaaataagatagttggattaaaggagtttatgaaatggcagcaggacaatttttagtgcccttaatgagtgggtttgtaattacggtgatttttatgccgctttttatcgggtatttacgctttaaaaaagaggggcagacaatccgtgaagaaggccccaaatggcacgctaagaaaaatgggacaccaacaatgggcgggctcttattcattattgccgctgttgtttcaagtatttgggtaggattattcttaaaacagttaacgaatagtctattaattgccatgtttattctggtgttatacggtattctcggtttttcagatgattttattaaagttttccgtaaacagaacttaggcttacgcgcttggcaaaaattgttagggcaaattattggtgggattgtcttcatcgctgtttatttccatgaaggcttcagtactgcacttgaaatcccagtaattggcactatttcaagtaactggttcttttgtgtattcgtcttagtgtggttagtcggtttctcaaacgcggtgaacttaacggatggcattgatgggttagttgctggcttggcaaccatctcatttgcaacttatacaattatcgcctttcgtcaaaaccaaattgatgtcgccattttcggcctcagcattattggcggattgcttggctttttaatctacaataaaaaaccagcgcaaattttcatgggtgatgttggttcactagcacttggtggcgcactagcagccatgtcaattttattacatcgagagttctcactgctattggtcgggttagtatacgtcattgaaacagcaagtgtgatgttacaagtcggttcatttaagttattccataagcggatttttaaaatgagtcccattcatcatcacttcgaaatgtcagggtggagtgaatggcggattgatatcagcttttggttatttagtatcatctgttcagcaatttatctgttaattttttagaagagggcgaatttaatgaaggccagcacgacgtatcaagatcaggcagttttagttttgggattagggaagagcggctttaatgctgctaaattgttattaaaattaggggcgattgtgaccgtcaatgacggaaaggaacaagaagacaatcctcaagttgcacaattgcgtgaattaggggcaaccgtcattactggatcgcatccattggcgttatttgagcgcaactttgcatacctcttcaaaaatccgggcattcgttacgataacccaatggtggcagaagcgattgcgcgtaagattccagttttaacggaaccagaacttgcgtacgaagtgtctgaagcccaatgggtcagtgtgactggttcaaacgggaagacgactaccacaacgttaattacgttgatgttagatgaaaatcgcacccaggggcacgcatacgctgcgggcaatatcggcattccactaagtgcggtcgcccaaaaagtgacggctgccgatgtgatggtcacagaattatcaagtttccaactactcggtacaacaaccgttaaacctaagattgcagttttaacgaatatttatgaagcacatttggactatcatggctcgcgtgcgaattacgtggctgcgaaaatgcgacttattcaaaaccaaacggctgacgacttttttgttgtcaactgggacttacctgaactacgtgaattgagtcgccaaactaaggcgcaagttgtgccattttcacggctaggcaactctgaagctggcgcctatgtcaaagatggccaactttgttttaagggtgaagtgataatgccagtgactgatattaacgtccctggtgaccataatattgaaaatgctttggccgcaattgcggcggctaagttgatggaccaatcaaacgatgcgatcattgatgttttaacgacctttaccggtgttaaacaccggatgcagtttgtgacgagctatgaaggtcgccgcttctataacgactctaaagcaaccaatatggaagctaccgaagtcgcgttgaagagttttaaacaaccaattgttttattagcgggtggtcttgaccggggctttactttcgaaccattattaccactactaaaagaacacgtaaaagcaaccatcttatatggtgaaaccaaacaattgttggcacagacagcacgtgaagcaggtattcccgtcatcaaaatagttgataatttaacaaaagcagtgcctgaagcttatgctgctagtgaagccggcgacgtggttttattgtcgcctgcatgtgcgagctgggatcagttcaagacgtttgaagaacgtggagacgtctttattaaggcagtcgaacaaattacagattaaattggagattctaaaatgagagtaatgatatctggtggcggaactggtggccacatctatccagcgttagccctaattgaaagaatgcaacaacgcgacttgttggatgccgttttatatgttgggactaaacgcggtttggaaagtaaaattgtgccagatcaagacatcgattttaagacgttagaaatccaaggatttaaacgttcgatgaatatgaagggcattaaaacgaatattaaaacaattcaacttttcttgcgcagtgttaaagaggcaaaagaaatgattaaaacattcaaacctgatattgtgattggaacgggtggctatgtttctggggcattgctatatgcagcaagtcgcttaaaagtgccaacgttgattcatgaacaaaactcagcagccggggttaccaaccgctttttggcgcgctttgtcgataaagttgccatttcctttgaatcagtcagcgaccaattcccaatgcacaaaattgtattaacaggtaatccgcgggcccaacaagttgctggaatgttaccaaacgaacgtttaagtgaattcgggcttaagactgacagtccgacagtgcttgtgtttggtgggagccgtggtgcaccaagtattaaccaagcttttatcgatgcagtaccagcacttaatacaagagagtatcaggtgctattcgtttctggacgggttcattttgatgatgttcaagcacaattaaagacgatgacgctcaacgataatttggctgttgtaccatatatcaacgacatgcctgaaattttaccagatttaaaggccattgttggtcgtgctggtgcgacgagtttggcggaaatcacagcacttgggattccgtcaattttgattccaagcccctatgtaacaaatgatcatcaaacaaaaaatgccgagagtttggttaaagaagacgcagcgattttaattccagaagcacaattaacgggtgacaaattagttcagtcattagatacgcttttggcaacccctgatagtcaacaagccatggctaaagcagctaagaaaatggggattccagacgcttcagatcgcattattgaagtgattaatactatcatctaagttaagaagggggcggatgacttgaagaaaaaaacaactaaaaatgggtcgctcgatccgctccaattactaaacgtttggcgtgcttatcaactaaagcgttggaagaaacaacgtcggcaacggttaacgcctgggcgaccaacaattagtggtcaactaccacatctaaaagcgcaacgaacggcaaagacaaagtggcggttgacagcgttattgagcactttcacattgggcgcttgtgtggcaatctattttatgttgccgattagcgacgttcaacaaatgacggtcaacgggactaaatcagtgcctgatcaacaggtgattaatgcgagtggcgtacggattggcaataacgtcctgacacaaatctggcaggaaaaagcgattgagaagcggattcaccagaaactacctaaggtgaaaagcgtaaatgtcaaagttgatcagtttaatcaactgacattggcgattaaggaatatcctacggtgggctatctagtgcggcataaacaatattatccaatcttagaaaatggcacgattttaaagacgaaaatgacgcagtctctcggcaatagccctgtctatagtcaatttaaaaatgacgccttcttaaagcaagggttaaaactatatcaagcttttccaaacagcattcaaagtgctgtgtcggaaattcgtttaacagttaagaacaataatccttatcaagttcacttatatatgaatgatggtaatgaggttgttggggatttgcggacacttgccaagaaaattaaatattatcccacactggcgaaacaaatggacggtaagggacgaattgacttagaagttggcgcttacgccaaattatttgataattctgaggctgattcaacaaaaaattagttaacactgtttaaaaagattggattggctttctaaatctagtcgaaatgtggtactatttagcataggaatcattttattctaattgaatgcaaggaggttccacacacttaatggagaattcaaaaatatatgtcagtcttgatgtcggaactacttcaattaaggtaattgttgcagaatcaattaataaacaacttaatgtgattggcgtcggatcagctagatcaaacggattaagtcgcgggacaattgtggacattgatcaagcggttaccgctatccaacaagccgtacaacaagcagaacaaaaagcaaatattgaaattaatcgggttgttgctggaattccagccaaccaactacaaatcgaagaatgccaagggatgattgcggtctctgatcaatctaaggaaattactggtcaagatgtgcaagacgttgccagtgccgcattggttcggaatttaccacctgaacgtgaaatcctcaatatcttaccgcaatcgtttacggttgatgggtttgatgggattaaagatccacgcggaatgatgggggttcggcttgagatgaacggaattttgttcaccgcacccaagacaatgattcataatttaaagaaatgtattgaaaaagcgggtttaacactatcacaactcgtagtgaacccattagcacttggcaagctagccttatcagacggggaacaagattttggggcaatcgttgtcgaccttggcggtggtcaaagtacagctgctgtgattcatgatcatcaattaaaatttacggcgattgatcaagaaggtggcgaccatatgaccaaggatatttccgtggtcttgaacacgtcaattgaaaatgctgaaaaagctaaacgagattatggtaatgctgattcattggctgcttcagaagaagaacaaattccaattgaagttgttggtcaagccttaccagtgcaagtgacagagaaaaaattagctgagattattgaagcacggacgatgcagatttttgatcgtttgaaagctgaattggataaagtacacgcttttgatatgcctggtggggtgattatgaccggtggcgtgacagctttacctgggattgtcgacttggctaaggaaatctttaattgcccagtgaagttatacattccagatcaaatgggcttgcggcatccatcatttgcccaagggttgagtttaattaactacatagctaacttgtcggaagttgattggttggtccaaggcgcacttgggaatgtagcacagactgaattagaccaaacagtgacgaaatcaacaatgaaatctcaagcaacaaccaaagaagtaccaagtaagaaaaccaaacctaaaaatcaatcaaaaaatgcattcgaaggcctgaaaaatttctttagtaacttttttgaataagggctagtcgtaacaggaggaaaaacagatggaatattcattagatgcagcacaagaaaatagcggcgcaatcatcaaagtaatcggcgtcggtggtgctggtggtaacgctgtcaacagaatgatcaacgaaggcgttaaaggcgttcattttattgcggctaacactgacgttcaagcacttgaagattcaaaagctgaaacaaagatccaattaggacctaagttgactcgcggcctcggtgccggcgcaactgctgaaatcggccaaaaagctgctgaagagagtgaagaagtcctcaacgaagccttaaaaggcgctgacatgatctttgtcacagccggcatgggtggcggtaccggaactggcgctgcccctgttgttgccaaaattgctaaagatcttggcgcactaacggtgggggttgttactcgtccatttacatttgaaggccctaaacgtggtaaaaacgccgcttcagggattgctgaattaaagcaacatgttgatacaatggtcatcattgctaataaccggttactcgaaattgttgacaagaagacaccaatgatggaagccttcaaagaagccgataatgttttacgtcaaggggttcaagggatttctgacttaattacatcaccagggtttgtcaacttggattttgctgatgttaaaacagttatggctaaccaaggctctgccttgatggggattggttcagcaacgggtgaaaaccggacagctgaagcaacgaagaaggctatttcatcaccattattggaagtttcaatcgatggtgcagaacaagtcctcttaaacatcacgggtggaccagacttgtcattgtttgaagcgcaagatgctgctggtatcgtgcaacaagctgcaactaacgatgttaacttgattttcgggacttcaatcaacgaaaatcttggtgatgaagttgttgtaacggttattgcaactgggattgatgaagataacaacaaacgtcgtccagcaacaaacaattcagcaccaaagacaacagcgccttcaacaccatcagaacaaaataatgatccatttgtagattgggatatgcgtcgcgaaccaagtgcccgcgagcaagcgcaagcaactgaaaaatttgatgaaattgaaaagaaagatttcgatatcttcaaacggacagcccaagcggatgataataagcaagataaccaaaatggggacgatgtgccgccatttttcaagcgccgtcgcaataactaaggaggatgactcatggctggtaagtttagtcttagcaattttttcggcatgtcagatgaagatgaatatgctaatacgcaagaaactgcggctgtcactaatgaaggtgaaccaagtgttcgcccgaataacgtcgtctcgatgcaagctgcgggagctactaaaatgaataaaattgtcttatgtgaaccacggatttattccgacgcaaaaaaagtcggcaaaagtttacttgaaaataaagcagtgattgttaacttcacacgaattgaagcgacacaagccactcgaattgttgatttcctaacaggggcagtttttgccatcaacggtgaaattcaacgggttggtgatcagattttcttatgtacgccaccgaactatgaaatcgatggtaatctttcagatattgtcgatcaaaatgattttgatattgaggtgaactaggtgcaactatttttattttatgtgctcttgatgctcatgtatgtggtacggatttatagtggcatcgtcgtaatctattgtttattaacgtggattccagaggcgatgggcagtaaattagggcgctttgttgctaagttagttgaacctttcttagaaatctttgaccgcttcattcctgcaatcggtggtattgggatttcagccattgctgcgtttttcgttttatatttagtagaacgtgggatcggcttactcgcacaattattagtggggatgtaatcaatggtcaatcaagcagatgtctatcaacattttagaaaaagcgaggcgccatttgttgcgcaggttttggattggattgagcaagcacaagttgaatatcgaccaatcttaacggcgtttttagatccgcgtcaagcgtttattttacaaaccttggtcggtgaaaaaggggacgtccgttatcactttaatggcggatataacgctgctgaacggaaacgggcaatgattgctccagattactttgaaccaacggatgcggattttgagattcaattatttgagattcggtacccgattaaatttgcaaacctatcacatgggaaggtgcttggcacgcttgtgaatgctggcattgaccgtgatgtttttggggatattatgaccgatgaagaacgctggcaattctttgtgacgaagaagatggcaggctatgtcgaagagcaaatcactaagattggtcgcgtatcagttcatttgcaagaacaagactatacacagttgttgacgcctaaggacgcttggcaattcgaacaaacgactgtcagctcgtttcgcttggatacgatcatttcaactgtttacaatctgtcgcgacaacgcgctaaagaattaattcaagccaacaaagttaaactgaattggcaagcatttgataaaccagattttgaattagcactattagatatcgtctctgttcgtggttttggccggattcaactccaatcgattgatggtcagactcgtaaagaaaaatatcgagtgacactggggattttaagaaaataattgctgaaaaagatggaggaatttcaaaatggttttaacacctttagatattcataacaaagaatttaacacaaaaatgcggggttacaatccggatcaagtcaatgatttcttagatcaagtgattaaagactacgaatcagttttaacagaaaatgaaagtttaaaagcggaattaaaatcaagcgatgaaaaagtaacgtattttaatgaattgaaagatgcgttgaaccaatcaatcattgttgcacaagaagcggctgaccgtgttaaagataacgctaaaaaagaagctgaaatgattcaaactgaatcagaaaagaatgcaaaatcaatgttggatgatgcaactgaaaaatcaaaccacatcattgacgatgcaactgaacgtgcaaaacaaattgcaatcgaaaccgatgacttgaagaaacaaacacggattttccgtcaaagattacaagttatgcttgaatcacaattagaagtggttaagagtcctgaatggacagatttattagctaaagatgatttagcggaccatcaagctctttcagctgaaattgatatgacagaccttgacaaccatgggtcaaatcaagtaaactcggatgcagaagttaaaccttggggtcaaattgctgaagatgatgtgacaacaacgcaaaccattattttccctggtgaagaaacaccagtcgaagaagatgacaatgatgaagtgctctccgatgtagtcgaagacaccgattcagatgaagtggttgaagctgttacggattcttacaacccaattgaaaaccaagcaacagatttaaataaggactagcaagcaaaacatcatttaagcgagccaacgacggtggaaggttggtaatgctctgtttagcggtgtatcaccttatttcattccagatgaattgagtaatttgggacgcttaatgcgcgttattgcatgttgaggaaggtcattgaccttcaaatttaggtggtaccacgaagatttcgtcctattcagggcgggatctttttttgtttttaaaaataaaggagtgatttgatgcgtatcaaagaaacattaaacctgggcaagacagctttcccaatgcgagcaggtttaccgaatcgtgaaatcgattggcaaaaaggttgggccgataacaacctctatcaacaacggcaaaaattaaatgaaggtaaaccttcattcgttcttcatgatggcccgccatttgcgaacggcaacatccacatgggtcacgccttaaataaaacaagtaaagatattatcgttcgttacaaatcaatgaacgggttccgcgcaccttttgttcctggatgggatacacatggtttgccaatcgaacaagccttggctaaaaagggtatcaagcggaaagaaatgagcctcgttgattatcgtaaactttgttacgactatgccatggaacaagtcaacaagcaacgcgaagatttcaagcgtcttgggatttctgctgattgggataacccatacatcactttaacagctgattttgaagctgaagaaattcgggtcttcggtgaaatggctaaaaaaggttatatctataaaggtaagaagcccgtttactggtcaccttcatcagaatcaactttagcggaagctgaaattgaatacaaagacatcaagtcaccatcaatgtacgtggcgtttaacgtggtggatgggaaagacttattagatgcggatacaaaattcatcatctggacaacaaccccatggacaattcctgctaacttagggattgcggttaacccagctttcgattacgttcaagtgttagctgacggccaaaaatacgttgtggcagcagaacgtttgaacaagatgactgatcttcttggttgggaatcagttgaaatcttgaagactttcaagggtgctgacatggaattaatgacagcccgccacccattatatgaccgtgaatcattggtgatcttaggcaaccacgtgacattagaaactgggactggtttagtgcatacggcaccaggtcacggtgaagatgattataacgctggcactaaatataagttaccagtcctttcagtcgttgacagcaaagggattatgactgaagatgcccctggttttgaaggcgtttattacgataaagccaacccaatggtgacagaagcgcttgaaaagaacggttcattattgaaactcgacttcttcacgcatagttacccacatgactggcggacaaagaaacccgttatcttccgggcaacagcccaatggtttgcttcaatcgatgcgttccgcgatcaaatcttagcacaaatcgaaaaagttgaattcatgccagaatggggaaagacccgtctttacaacatgattcgtgatcgtggcgattgggttatctctcgtcaacgggcatggggtgtgccattaccaatcttctatgctgaagacggcacagaaatcgtcatgccagaaacaatcgaacgtgtggcgcaactctttgcagagcatggttcaaacgtttggtttgaatgggatgctaaagatttattaccagcaggctttacacatcctgggagtccaaatggtgaatttacaaaagaaaaagatatcatggatgtctggtttgattcaggttcatcacatcaagctgtgttagcggctcgcgatgacttaacttatccagcggacttaatcttagaaggttcagatcaatatcgtggctggtttaactcaagtttaattaccagtgttgcagttggcgaagtcagcccttataaagctgttatttcacaaggctttgtcttagatggtaacggtcgtaagatgagtaaatcacttgggaacacaatcttgcctgaaaagatcatcaaacaaatgggggcggatattgtgcgcctctgggtcgcttcagttgatgctagctcagacgtgaaagtcacaatggaaaacttccaacaagtcagtgaagcttaccggaagatccggaacacaatgcggttcatgattgcgaacacaactgatttcgatcctgctaaagatacagttgattacgcagaattaggttcagttgataagttcatgttggtgcgcttaaacgcaatcatcgccagctgtaaagcggcgtatgatgcttacgactttgccacagtttataagacaattaacatgttcttgacgaacgaattatcagccttctacttagacttcgccaaagacgttgtttatatcgatggtcaaaatgatgcacctcgtcgtaacatacaaactgttttctatgcagtagcagtagccttgacgaagttattgacaccaatcttgccacacacagctgaagaaatctggagctacttacacgaaccagaagaattcgttcaattagctgaaatgccagaagttgaacattttgccggtgaagaagacttagttgaaacttggaatgccttcatggggatccgtgacgatgtcttaaaagctcttgaaacagcccggatggacaaggtcatcggtaagtcattagaagcggccgtaacactttatccaaacgaagccaatgctgctttattagcttcattggatgctgatgttaaacaattattgattgtctcacaattaacaattgcggatcaaaactcagaagtcccagcagaagccacacaatttgatggcattgcggttagtgttgcgcatgctgagggggacgtttgtgatcgttgtcggatgattaagactgatatcggttcagatgataagttcccaatgctttgtgcgcgttgtgctgcaattgtcacagccaactatccagaagcagttgcggaaggtttagaaaaataattaatgtgttaaagcggtgcgaatatcaaattcgcaccgctttttttgtgcaatcgataataattagataacgttttcattgctataaaattaatctttgttaataatattaccgttaatgattgtttattggtaaaataacaatagtaattagaacgggtgggtaaatgacacgacgacaagcgactaagcgctatatggcaatgattttaatcgaattattaatggatcaaagagtggcgaaattgacggtcgcgacttttttgaaaacggctaatttatcacgaacgaccttttataatcattttccaacgggcatgtgcggcttatttcggtggacacttgaacaacagattattcaaaaagttgatgagagtatagtgagtggcgactgggaatctggctgtcatgaagtcgttcaatttattacacggtatcgcatgttttgcttgaatttatatcatctagcggattatccggaacgccgccgcttttttgaacaggttatgaaacagattattcataaggcattgcgccattacaaagcacaatacacgccacaacagttaaatcacttggaagacttttacggcggtgcaatcattcgccaattagattgttggtttgaaaataatctgcagaccgaaccggaggtgattgatgagcggttatgttttaatttgaagcagcttgagcaaatcgttaaaagtgactaaacaatttagtgatattgttcactttccggacaattcgctgaacttgtaactggaatgctgcccaggttttgctacactaaggatgtaccaaaaaataatattaatagcaactccacacaacgaaaagccctaccggaatacggtagggctttttgtatacattaggtagattgtaaaattaatccgaacgctgttcggacaaaaaagatcagcttcctttaaaatggtgtttaccacaaacccatcttttaggagctgatcttttgtctagtataacctattccgaacgaattaaaatcgaaaccttttgtgaactagggctgtccaatatccaaatgggcgttcggctgaaccgatcaccgtcaacaatttcttatgaattatctcgatgtcaaccttatcaggctgaattagcacaaacagatgccgaatacaagcgatcacgatgtggtcggaaaactaagctgagcgatgagttaaagcaaaaaattctcaaccatttacgtctaagctggtcaccaggaatgattgctcacgaatttaaactagctactaaatctatttataattggctaaatcaggggagaattggtttctccttgaatgatctacctgaacatggcgtacgccaacggcgtaacgttgaccaacgatccaaatataatcaatctttggggcgatcaattgaacagcgtcccatgatgattaatcaacgtaagcgcatcggcgattttgaactagatacagtcgttggtcctcgtgggcatagtaaggcagttttattaactttaatcgatcgcaaatcacggttcctttgggcataccggttaaaagatcggacgacagcgactgttaatgaagcactaactaagttcctaaccacttttaatggtccggtgcacagctttactgtggaccgtggcactgagtttagtgggctagtatcacttgaatcacaatatggtattaagacctattactgccatgcttatactccagctgaacgtggtagtaatgaacgctttaatcggaatttacgttatttttatcctaaagggactcgttttgagcacattagtgctcaagatttaacgacgacgttactccaaattaaccagcgaccgcttaaaatactcgactggcaaacaccgtatcaggttatgctgacaaatttgtccaaaaattcggattaaatttgcaatctaccattacacaagatgtactagaataaagaaaaacaagaagaatgaccgtagcaacgggcaaaggtttatctttttttaataaaaatagcgctatcataaacataaggaggaaaatatgactggttatatgaatcagatattgaatgctttgttaaagaatggagattacatgacagcaaatgaattggccgatgtagttgccgtatctcaaaaaacgatttacaggtcggttaaatcgataaatgagacttataaaatgactttagtagaatcggagcatggaagaggctatttgttaaattaccagaattatttacaaataatgaagcaaactcacgaaaaagattatgtcgcattctcgccagttgagagacgaaatgtaattatattaagttgtctattcaatgcaccattcacgaaaagtatagaaaatttataccataagttttatgtgagtgaaacattgattcgacaagaggctcctatgtcaagaatccggacataaaagtacgaacaaatttgactttcaatttaaattacttaatttagttttcggaggccgaagttttagtcccgttcagattttaaaaacgctttagagtatattaaataagccccaacattattgaatttaatagcctgtagctacgctacaagtgaaatacgatcactgttataccaacgaatatagttatcaattccggcgattgcttcatgaattgtcttaaaatcttggaaattaacgtattcacgtttcaaaattgaatgaaaactttcaattcgcgcgttatcgccgggctgaccctttcgggagtaagaatgcttgataccatacttcgataaagtgttttcaaataagtcacttgtgtattggcttcccatatcactatgaataatttgtggtttaactgcttgcgccatgacttgggtaataacgttagtcgctagttctttagtcatctgcgtattaagttggtaagcaataacccgtcgggttactggattatagacactagctaggtaacaccaagtatggttaaggggaatgtacgtaatatcagtcaataaaataccagattgatcagttaactgcttaatcaagtttggtcgctgatcataatcagtctgagtggttggcttattgattcgtttaaccattctagatctaatccctaattcacacatttgttgatagaccagacgctgactaacgtgaatatcagactgttgatttagtaagatcgttaatcgtgggtagccatacattggatatcttaaccaagccgttaacacttcttgtttaattaaatgccggcggcgttcagttctacttggctgccaatgtagataatcatagtaggttgagcgcggaattttgagtactgataagatacgcgtaatgcggtgcccagcaagtaaattagcgttgacgacttctaacacgagggcacgccctttaataattagctttttaccatgagcaccgccgctcgttttaaaatatcaagttcttcttttaaccgtttattttctttaatcagagcacgttcatttgatgatagcactttagtgttgttaggatcagcttgtttaatccacttagtgaccgttgaaacactgacgttgtattctttagccagtgagttggccgaacggccagtctgacttaagctaacaatcgattctttaaattcatttgaatatttaattgccataataaaaagctcctttatgatgtattatatcgaacagtttgtccgtaattccatcataggagccgttctatcatcagctttaattctagtgccattaacattgattattgcagttatcacgccaggcaattctgttttaccatttggtgatttagcaactttaccatatatgattgctgtaatggcagctgttttccgcggtgatatttttagaacaattattgggggcattgttaatattgttgcaagtctttatatcgcttcatgggtagcaccgttagtaacgcagtcagccaaagccgcacatttcgcaatgcaagggaattcatcaatttcagtgctcagcgatggtggtgtttggacaacttgggttattgtgggactgggtaagataatgagttggggaggtatcgggataattggaatagttactttagcaattatggtctggtacaacaaatttagaagtaaaaagctagttaaagttaattaaaaaataaggagtgaaacgcaatgaaaaaattaatgattgtttgtggtagtggtattgcaacatcaacaatagcagagggtaagattaaggaatatttagaaaaagaaggtgtacttagtcaagtacaaacatataaagggaacatagcagaatatattaatcaaattgataattatgatggatttgttagcacaactattgtacctggcaaattctataattaatccgaacagaaattaaaaagcccaaagcaatcacttacaatggtagtagctaattccaaccaatatagggagtgattactttgggtacatctactttatcacgttttcaacgtggcgcactagcacaactggtcaatgaggggaataaatcttaccaagtaatggctgacgccttaggcgtcgccaaagctacgattagctatgagttggaccgagttaaaccttatgatccagaattagctcagcgagatgcagatcgcaaaaggcggaattgcggtcgtcgttcgatgctgacggcagcattagcgactttaattaccaatcacttacgattaacctggtcaccagaaaccattgcggccgcttataacttgagcactgcgtcaatttataattggcttaatcgtggctggctccccttcaaattgactgatctacccaatcggaatgtccgccagcaccgagtgagcgaaaatcgtgggaaatttacaagtgggacttccatcgaacaacggccaacaactgttaatcaacggttagcttttggtcattgggaagtagatacggtgctttctagtcgaagtgagtcacgatcatgtctggttacattcgtagaacgtaagacccgacttctatgggccatcaaagcccctaatagaacggctaaggctctaaacaccgcctttggcaagtttatgggggccttcggtccccaagtaaaatccattactgttgatcatggtaaagagtttgccaattatcaggccttagaacaggattatcagatcaaagtttatttttgccatccatattcaccatgggagcgaggttccaatgaatattttaatagacggttacgctggttcttcccgaaaaagaccaattttagccaagtaacgactgatgagatcctagcagcacttgaactaattaatcaacgaccattaaaaatacatcatcaacagactgccattgaaagattccgggcttgttcggattaaacttgtaatttgccataaaaaagaatattctaagaattcagtttcttagaatcttttattttggctgttgaaatattattatttatgatactttcgcgatttctgggttgttccttctcaacatgcgttatactattagtcagttactattttgatcaattgaagtaagaggaattttaaatgcaaaaaaaactagttatcacggaaaaaccaagtgttgccaaagagcttgctaaagttctaggaacaactcagaaaactaaaacctattttgagggcgatcaatacgtcatcacttgggcgtttgggcatttgttatcgctgcaattaccagaggatatcaaaaaagaatggcaacaatggcgtttggaagacttaccgattattcccaagcatatcggtttaaagccattgcctaaaacgggtggacaattaaaagctatcagtcacctcgccaaccgcaaagatatttcaggtgcggtgattgcaactgattcggggcgtgaaggggaagccgttgcgcgctatattttggaatggattaaattcgataagccggttgaacggctctggatttcatcgcaaacgactaaggccattaaagcagggtttgcaaacttaaaaccagccaagcaattcgataatttgtacgcatcagcgttagcacgcggcaaagcggattggttgattggcttgaacgtgacacgggcattgacgaccaagtatgaagataatttatccgctggtcgggtgcagacaccaacgttagcctttgtgaacgaaacggcacaacaaattaatcgttttaaaccgcaaacctactacacaattcacttgacggtcgatcaacagcaagccgccttacaattagcaaatccgcaaagtattaagacgcgccaagcggcagacgacttagttgcacaattgcaacaagccaaaggccaagtggtcagcgtcaaaacaacgcagaaatcgcaatcagcacctttaccatatgatttaacggaactccaacaagtggccaacgcaaagtatggtttatccgcgaaaaagacgttatccttgattcaatcattgtatgaaatccataaagttgtcagttatccacggacggattcgaaatatctctcaacagatatcgaagggactttgaaggaacggttgtcggcattagtcaaatttgatccacgtgctaagcaatacttggggcaaggcagtcaggtcaaacaaaaagccgtctttaatgatggcaaagtaacggatcactacgctttaattccaactgaagaacccgttcgtgccgaaaaattatcgacggatgaactgcgcatgtatcgcttgattgtggaacgcttcttagggttgtttgctgatccatacgtgacagctgttacgaaagccaccgttaagtttggtgatcaaacctttacgtttaagcaaacaaaagtcgtgcaacaaggttggcatgctgccgataaagaggggcaaccaaccgcgacggtcgactggcgagaagggatggtagttcgggctaattttgcggttaaagaacaattgacgacgccccctaagccattaactgaaggaacgttgctcgggaagatggaacactacggtttggggacgccagccactcgtgctgaaatcatcgaaaaattagtccgtagtgaactcctagaacgacaaggtcatgctttagcagtgacgccaaaaggtcagcaacttttaaaattggttaatcagaccttggtttcaccagaactgacaggaaaatgggaacagtcgcttgaagcgattgccaaaggcgaagaaaatccgaaggcgttcatcactgaaatcgagggtgccactaagaccttggtcggtgagattaaaaagagtgagacggaataccgcgattttgcagtgacgaataaaaaatgtccggaatgtgatcatccgttaaaagaacgcaatacgcgtgacggtaaaatttatgtctgcacaaactgtcactatcggcgtcggaaagatccgaaggtttccaaccaccgctgcccacaatgtcacaagaaaatggtgattattgaagggcaaggcggcgcatacttccggtgtcttaatgatgggacgaccgaaaagatgctcgacaagaaagatcgtaagaagaaaatctctaaacatgaagaacgccgcttgattcaaaaagtgaaccaagaagatgaaccagcggaaagtccattagccgctgcattgcgtaaggcaatggaaaaataagctagcaaaagaggtagcaactagaattattctggttgctacctctttttttttgtttagaaaagttgtttgacttgttgtttggtgcggtcaacaatattctgaccgtctttgacttgcatgctagcatctaagtgagaacgaccagtcatgtaatcgaatgcgacgccaggttcaacattccagacgtaatcgttgaaattcagcgtgccatctgttgaaatggcttgaacccagtaaccgcgcggcatcagttcattaccccgaaaaacggtggtgactttgtaaatcacttttttgtttgcttcgagcgcagtgcggactttttcttcaaaaatctgcatcgttttctgattactgtacgcgctttgggtggcgaggttaagtggattatctaaactgcctggttgaccagcttgaaagttaccattctgatcaaaattaaaagtgagtgtataagcaatcaagtggccacgattttgcggtgtgattcggcggtcattgacaatcagaggttgattatgccaacccgttggattccaaatttggcgcgtccggccttctgatttgcccagattccgctttgataagtaagctgtgacgctagttgttcggttaagctggtcgagttgcccatagacgattttttcaccttgccaatccgttgctgttaattggctttgatcgttattaattggtagataggccgcagatccgcttttaaaatcttgatcagcaatggcttgataatcaggactgactgggggtgtttgtttagctggttgctcagtagcaactgtagcagggaacacattttgtaagacattgttgcgaccaccgagataaccgactgccaagatagcaatggttaagatggttcgtctaatttttttcgttttcaaaagagatactcctattaatgaaaattgatttgagacaagataaaaacccacgagatgaattgatcatcggtgggctgaaggtattattttgaactattgcgtagtgtcagcgtcgtgccaatcgtaatgacttgggggataatttcgctagcggcgagttgtttaaccaataactcggcagctgattggcccatttgttcagtgtaaactttaacggaacttaaagtagggaacgtgtattggcaaattgaggtatcgttgaaactaatcaggctgagttgttcagggactttgatgcctgattcatgtaaggcgcgtaaagcgccgactgccattgcatcattggcgatgaagagggcttctggtaaatcggaactttggtcttgtaataattgtatcatgagttggtaacctgattcgggtgtaaagtcaccggttaaaatccaatcggggtgatagtttttttgagctttgagtaacgtcttaaaatgaataaaacggggatccggtcccaatttagtattatcagcagtgctctcttgaccagttaacataccaattttagttaagccggcggttgtaaaatgattgattacggatttaattggtgttttgaagtcggtcatcacacagctgacttcacaatcgagcgtgttcatgtcgacgaagacgaggttgtggttgagtttttttaggcgcttaatctgcgcagggctgtacttaccaattaccacagcacccgtagcatcatggagcgtatcaaatggatcgttttgaaagaagcgtgttacgtcataaccaagttctttgagtttcttttcaacgccaagtcggatggagaggtagtatagatcttccaattcttctttagcggtataccattcaacaatcgcaatgcgtccgcgttgctggttcattttgcgcgtgtttttacgatagtttaaactttcggcggcttcgaaaatccgttgccgggtctcatcgccaaccgaaagtgtttgatcataatttaggacccgcgaaacggttgcattcgaaacgttagcgagttgagcaatatctttgatcgttgccaaggtgcacctctcaattcaatgtttactattacttagtttagcataaccaatgaaaagaaagcgatagttaacaaaaaagattgattttttagtaaatgtttagtaaaatgaaagcgattaataaaggaggaatttactatgaacatgacagaattaaataccgcattcgaaaacgcattccacaaagcaccggaagcgagctacttcgcaccaggtcggattaacttgattggtgaacatactgattacaacggcgggcatgttttcccaaccgcgattacattgggcacatatgcagtcgttgctaaacgtgatgaccaaacaatcaatttattatctgggaactttgaagatgcgggtgtcatttcatttgacctcagcgacttatcttatcaaaaggcccacaactgggcgaactatccaaaagggatgattgtttaccttcaagaacaaggttacacaatcgacagtggtttggacatttatttaaaaggcaatattccaaacggcgctggcttatcatcatccgcatcaattgaattattaatgggtgtgattctagaagaccaattcaatttagaaattaaccgtgtcgaccttgttaaaaccggtgtcatggttgaaaataaatttatcggcgttaactcaggcatcatggatcaatttgccgttggaatgggcaaagccaaccatgccatcttactagacacgaacacattggattacgatttagtcccaattgatttgcaagacaacgtgattattatcatgaacactaataaacgccgtgaattggccgattcaaaatataatgaacgtcgcagtgaatgtgaaaaggccttagccattttacaaacgaagaatgatattcaatcattgggcgatttagataacgaaacctttgatttacaaacatacatgctacaagatgaaaacttgttgaaacgtgcacgccatgcggtttctgaaaaccaacggacaatgaaggcccgcgaagccctgaagaacaacgaccttgaacgtttcggcaaattagttaatgcgtcacacgtgtcattgcaatttgattatgaagtgactgggatcgaattagacacactcgttcaaaccgcttggcaacaaccaggggtcttaggcgctcggatgactggtgcgggctttgggggttgtgcgattgcaattgttgctaaagaccaagtcgacaactttgaaacgaatgttgctaaagtttatacagacaagattgggtatgcgccaagtttctacgtggcagaaattgccgatggcgctaaaaaattaggttaatcagtcaactgaagaggagaatgataagatgacagttttagtattaggtggcgccggctacatcggctcacacaccgttgatcaattaattcaacgcggcacggatgtggccgttgtcgacagtctcgtcaccggccatcaagccgccattaattcacaagcgcgcttttaccaaggcgatattcgcgacaaagatttcatgcgcagcgtcttccaacaagaaaaagtcagcggtgtgattcatttcgccgctttctcaatcgtgcccgaatcgatgcaagcaccacttaaatatttcgacaataacacatacggcatgactgccttactcgaagtgatgaatgaattcgacgtcaaacacatcgtcttttcatcaacagcggccacttatggggaaccgaaatcaattccaattaaggaatccgacccacaagtcccaactaacccgtatggtgaaagtaaattaatgatggaaacgatgatgaaatgggctgacagagcttacggtattaaattcgttgcattacggtacttcaatgtcgctggtgccaaaccagatggttcaatcggtgaagatcatcacccagaaacccacttgttaccaatcgtgttacaagtggctgctggcaaacgtgaacaactctccatctttggtgatgattatgatacaccagatggcactaacgtccgcgactatgtccacgcgttagacttagccgacgcccatattttggccctcggttacctcgaagaaggccatgatagtaacgcctttaacttaggctcatcaactggtttttcaaatatggaaattgtcgaagccgctcgcaaagtgactggcaaggcaattcctgtgacaatggcaccgcgtcgtgctggtgatccaagtactttgattgccgcaagtgacaaagcacgcgaagtcttaggttggacgccacagtatgacaatatggaagcaattattgaaactgcctggaattggcatttaaatcatccagcaggatacgcagatcggtagaggaaagcatatgcaagcaagagaattgattcaaacatttattgaaaaagtgattatctttcaagacacactttataaagcagaagaccaacagtacttatttaatctcgtcttagaccttgttggtgaagaggacagtaacgttgcggtgactgatcaaagtctcatcggattaaaggacgcattgttgcgtcttgcagttgcgaatagccggattgagaatttagcggcagaacaagatattttaggggcgaagttgatggatttggtgacgccattaccaagtgcggtgaaccgccatttttggcatcaatacgagagtgatccccaacaagcacttgccgacttttatgaattaagtcgggccaacgactacgttaaagtggccgcaatcgcgaaaaatatcgcttatcaagtgccgacgcactatggcgacttagaaatcacgattaatttatcgaagccggaaaaggatccgaaacaaattgcgttagccaaaacgatgaaacaaaccggctaccccaaatgtcaattatgtctggaaaatgaggggtatacggggcgtttagatttcccagcacggcgtaatcatcgcatcattcgttttgaattggcaggtcagacttggggcttccaatattcaccatatgcttattttaatgagcattcgattttccttgatggtcaacacgaaccaatggtgattaatgaaacgaccttcaaaaatttattacagattgtgaagcagttccccggctatttcgctgggagtaacgctgatttaccgattgtcggtggttcgatcttaacccatgaacattatcaaggggggcgtcacgattttccaatggctaaggcgccaatcgagacaccactacattttaacgggtataatgatattcaggcgggaattgtgaagtggccaatgtcagtcattcgtttgacgagtgcgaatgcaacgcatttggaaacactcgctgcacaaattttaactagttggcaaaattacagcgatccaagtgtccaaatcttagcccactcagaagacggcacaccacatcatacgattacgccgattgcgcggatgcgagacggtcaattcgaaattgatttggtactacgcgacaatcaaacgtctgcagaacatccagatggaatttatcatccacatgcagatgtgcaacatattaaaaaagaaaatattggtttaatcgaagtgatgggcttagcaattttgccaccacgactcaaagatgaaatggctgaggttgaacactatctctgcgatcaaccaaaccagatggccgcttaccatcaagaatgggcagatacgattaaagccgctaacacatcgattacatcagataacgtaacggaattagtgcggactgaagtcggcaaagtgttcatgcgcgttctagaagacgctggtgttttcaaatgcaacgaacaaggtcaggcagcatttattaaatttacgcaacatgtttaacctataaggagggacattcatgaagtattggcgagaagcatttggagaaataaatggtcaaacggtttggcagtattggctagagaatcgtcaggggtatcaattagccgtgacagaatacggcgcaacgattactcacttggtgatgccggatcaaagtggtcagatggccaatgttgtgattggctatgacaccctagcggattttgtaaagcaacaagcttattttggtgcgacagtgggacgcgtagctggccgcatcggtcaaggtgcttttacactcgatggtcatgattatcaagcaccgattaataatggcgccaacacgaatcatggtggccccaatagttttgaatcgcaaatctggcaatcatcagtggttgaaaaagatgatgcgattagtgtcgttttcatgttaacgagtccagatggtgaaaatggattccccggtaatttagcggtgaccacgacgtatacgctaaatgaggccaatgaatggctaattgactatcaagcaacgactgataaaaccacgttgtttaacccaacatgccatgtctatctgaatttgacgggggactttgatcaatttgttggccaacacacattgcaaatcgatagtgaccgttttggtgccattcaaccagacggcttaccaaccggggaattagtcccagttgcgggctctgtctttgatttacgtcaaccgcgagctttgcaagccgcttttgatagtgaaaatacgcaaactaaattggtcggtggttttgatcatccattcctgttgaatcaaacgccgggtaaatcggatgcgattttacgcgatcccgaaagtggccgctcgatcacaattgatacagaagggaatgcaatcgttatttataccgccaatggcttcggggacgaaccaaacttaacaaatcaggcaattcaaccccaccaagcagtggcgattgaagcccaaatgatgccagatgccatccatcataccgagtttggtaatattgttttgcatcctggcgaacaatatcaacggcggacccgatataaactcaattaatttattttacgcttgcatgcggttacaaaatcgcgtataattgacttgtttagatgaccgattctggtggctagataataattgtgtatttaaaaggagtaacatcatggaaaaaggaacagtaaaatggtttaacaatgaaaaaggtttcggctttatctcagcagaaggtcaagacgatatctttgtacatttcagtgcaatccaagacgaaggcttcaagtcattagaagaaggccaagcggtcgaattcgacatcgttgaaggcacacgtggaccacaagctgcgaatgttgtaaaactttaatttagaggaattaaatacgactattctaatttaatttaattaaatttaaattagaataaaatcgttcatgtttataaaaaaatagcataaaagtgttgacttcatttatcatgtgaactatgataagcacataagttaataaagcgattgaaaagcgcagtagaattagtaaccactattacagagagtcgggatttggtgagacctgacatatgtttctaagtcgaattacactttttgttttatcaaatcgtacgttgaatttacgttaaaatctagagtgatattttgaaagtgcactttcaaaatataacacgggtggtaccgcgaaaaaatgacatttcgtcccagtaatctttattttattaaagattgctgggacttttttaatttaggaggaaattttgatgagaaaaaatattattgatgaattaacatggcgtgatgcgattaaccaacaaacagatgctgaaggattgcgtgaattagtagaaaacaacaagatttctttatactgtggggctgatccaactggtgatagtttacacatcggtcatttgattccattcatgatgatgaagcgattccaattagctggacatcacccatacatcttaatcggtggtgggacaggatcaattggtgatccaagtggtcgtaattcagaacgccagttacaaacaatggaaaaggttcaaaaaaatgttgaagctttatcaaaccaaatgcggaaattatttggtaaagatgccaatgttacttttgttaataactacgattggttatcaaaaatctcattgttggactttttaagagattacggtaagaatttcaacatcaatacaatgttagctaaagatattgttgctagtcgtttggaagtggggatttcatttactgaattcacataccaaattctacaatcaattgatttcaaacacttacatgatgaacataacatccaactgcaaattggtggggctgatcaatggggcaatattacttcagggattgatatgattcataaacttgaaggtagcgacgaacccgtatacggtttaacaattccattaatgttgaaagctgacggaactaagtttggtaagacagcaggtggtgcaatctggcttgacgctgaaaagacttcaccatacgaattctaccaattctgggtaaatcaagatgatcgtgatgttattaaataccttaaattcttcacattcttagaagaagacgaaattgaagaattggcacaaaaagttgcaacagaacctgaaaaacgtgaagcacaaaaacgtttagcacaagaagtgacacgttttgttcacggtcaagaagcattagatgaagcggaacatattactgaattactttttgaaggtaatatcaaagctttagatgttgttgaagcagaacaagcttttggtaaagcaccatcagttgaaattagtaaagaagctaaaaacattgttgacttcttagtggatacaggtattgaatcttcaaaacgtcaagcacgtgaagatgttcaaaatggtgccattacaattaacggtgaccgtatccaagaaactgatgcgatgattgacccgatgactagctttgatggcaagtttgtgattattcgccgtgggaagaagaattacttcttagcacgtgttactgactagagacgttccaaaaattaaatgaaggcttttgtatctatactgaatgttactgggttcttcgtgaatgtagatcatatagtataaccccaaaatacaactgcaaaggtagctgtcaaacgttgtttgacggctatttttcgtactctaaaaaatcggaatcgctttcatgtgtttgcttttatggacaatgagcgtattctattgattggggttatactatatctacaatttaggaggattttttgttatgagtaacaatagttttagtgcaaaagatacagatttatctgctctatttatcggtgataaagctgaaaatggtcaactttacaaagatttgttaggtaagttagttgacgaacatcttggatggcgtcaaaactacatgccacaagacaaaccaatgatttcagctgaacaacaaacatcacctgaattccaaggaacggttaacaacatgaaagacgttttagacgaactttcagcacgtttacgttcacaatcagttccttgacataatgctggtcgttactggggtcatatgaactcagaaacattaataccagccattttggcatataactatgcaatgttatggaatggtaataacgttgcgtatgaatcatcaccagcaacttcacaaatggaagaagaagttggtttagaatttgcaacattgatgggttacacaaatggttggggccacatcgtagctgacggttcattagctaacttggaaggtttatggtatgcacgtaacatcaagtcacttccatttgcaatgaaggctgttgatcctactattgtagcaggcaagacagactgggaattatcaaacatgtcaactaaagaaatcatggacttagttgaagctaacggcgacaagattgatgaaatcaaagctaaatcagctcgtggtggtaaagatcttgacaagttaggtaaatggttagttccacaaacaaaacattattcatggttaaaagccgctgatattatcggtatcggtttggatcaagtaatcccagtaccagttgattcaaattaccgtatggatatcaatgaattagaaaaaatcgttcgtgaattagcaagcacagaaacaccaattcttggggttgtcggcgttgttggctcaactgaagaaggtgctgttgacggcatcaacgaaattgctgaattacgtaacaaacttgttaaagaaggcatctacttctacttccacgttgatgctgcttacggtggttatggtcgtgctatcttacttgatgaagataacaaattaattccatacaaagacctacaaagcaaatttgctgaatacaatgtcttcactgaagaagaaaaccttgtttcagaacatacttacaatgcatatgggtagattgcaaatttaatccgaattttcggacaaatttgtcagcataacctgatacggtgtttgccagtcgagtattttaagcggtcgctggttaatttggagtaacgtcgtcgttaaatcttgagcactaatgtgctcaaaacgaatccctttaggataaaaataacgtaaattccgattaaagcgttcattactaccacgttcagctggcgtataagcatggcagtaataggtcttaataccatattgtgattcaagtgatactagcccactaaactcagtgccacggtgcacagtaaagctgtgcaccggaccattaaaagtggttaggaacttagttagtgcttcattaacagtcgctgtcgtccgatcttttaaccggtatgcccaaaggaaccgtgatttgcgatcgattaaagttaataaaactgccttactatgcccacgaggaccaacgactgtatctagttcaaaatcgccgatgcgcttacgttgattaatcatcatgggacgctgttcaattgatcgccccaaagattgattatatttggatcgttggtcaacgttacgccgttggcgtacgccatgttcaggtagatcattcaaggagaaaccaattctcccctgatttagccaattataaatagatttagtagctagtttaaattcgtgagcaatcattcctggtgaccagcttagacgtaaatggttgagaattttttgctttaactcatcgctcagcttagttttccgaccacatcgtgatcgcttgtattcggcatctgtttgtgctaattcagcctgataaggttgacatcgagataattcataagaaattgttgacggtgatcggttcagccgaacgcccatttggatattggacagccctagttcacaaaaggtttcgattttaattcgttcggaataggttatactagacaaaagatcagctcctaaaagatgggtttgtggtaaacaccattttaaaggaagctgatcttttttgtccgaacagcgttcggattaattttacaatctaccatttaattaacttcttttggtccgctgttagcagcagtttgaccttgggtataggccaataagtgttcgcgcagatcattttccatgtggttgagttctttttcagccacttggcgtttttcgcggccttcttgttgaatcttgagggtttcttgtaaggtttcaacaagatcattttgtgttttctgtaaggtttcgatatcaacgacgccgcgttcattttctttggcggtttcgattgaagacatcttcaacatcgcactatttttcttcaagaggtcattggtcgtttcagacacttgtcgttgtgcagtgaccgcatctttttgacggagcagggtgagggcgatggcaacttggtttttccagagtggaatcgccgtgttaatggaagcctgaatcttttcagctaatgcttggttggtattttgaatcaagcgaatctgtggtgcttgttgcaacgtgatttgccgtgctaattctaaatcataagttcgtttttccaagcggttcttgaattgattgagatcattaacttcttgcacgaccatttgattatcgtcatttttggcgcgttccatggcttctggaatcgtcgttgtttctaattcttgaatcttcaactgaccagcagcaatataaatattgagtgcatcgaagtaggctttattcttcgcatacaacgtttcaagcgtctcattgtcgcgcattaatgcatttttttctttgtccaatttaacggcaatcccatcaatttgggcgccaattttttgatatttcgcagtgatttcatagaccgacttcttaatcttgccaaacatccgcttgaaaacgttgctgtcttcggcgcgtaattcgtcaggattggcttcgtttaaacggtacatcaatgacgttaatgcgtcaccaatttcgcctgtttcttggctttggacttggttgagcattgtttgggagaaagcgccgagtttcttttgggcttgagcgccgtaattcaagacggcttgttggtcgttgacgtccagttgttgtgccaattgttcggcctgtgcttgttgttcaggggagagcttattgataattgaggcctctgcctggggggctgcttcctcagtgacaactggcgcactttggtcgaaaggatcttttaataaatcattcattaaatcgtttgttggattgggcgtttcagacattagtcttcctccttgtgatctggggtgatttgttgttgagcgacggagacttctgtgtctaagtcatcgacgtcttcggccacgaaatccgcgtagtcttgttgaatctgttgactaagcgcatcaattgccgcagccgatttatctaaaacgagataggtatcggctgtcttgacttcatgatggttaatttcgatgtatttgctagtcagttcattgattgatggtaagtgccggtataaaaagtcgccagcattgtgaagccgctttggatctttcacaatcgcacgaaaaagcgattggctgaccttggttgtatcgtgatttaaatcgattgcccgtaatttaggaagagcttgcatgttggttgcaagtaccttaatttgcgcttcggcttgttgcatcgtttgtctgaaaaagtcaatttcgtcatcactcatgccagcatcttggtagtgtttcagcatttgtggtgaaatatgctgatcttttttatattctggttgtcgtttaagccgtttgaggctgattgtaacgtagatcagccctaataataaaccaaggctgaaccagatgaaattatcccaatcaccataaatatcaaagcatgttgccaaaattgggattgagacaagtgtaatgagcatgcctgtgcaccaaatcgttatttttttaaacataattgtcagctcctgatttaattgatgccttcattctaacaggaattaaggtaaaagagtatccgcctaaggatggatttttaattcggccgtgaacctgaatttagcattgacgatggcggacgattttaaatgcgcgtataatagcgattaaacggtaaaggtggcattagcagatggattatacagaaaaggtcctctcggaagaaacattattcaaaggccagatcattgatcttgccgttcaacaagtggcactgccaaatggacaaaccgcaagtcgcgagattgtctatcatcatggggcggttggcattattccgattacggcggataacagcatccttttagtgcgacaatggcgcgcccccatgcaacgtgaaacgttagaaattcctgctggaaagattgatccaggtgaaaagaacttagatcaggtcgcactacgtgaattgaatgaagaaacgggtttgacgacgcaaaagctcgtgcacgtgacggatttcttttcatcacccggtttttcaaatgaattaatgactttatactacactgatacactaacgccggtcacgcataagcgctcgctagatgacgatgagttcttgaacgtcgaaaagttgacgttagaagaagcacaagcagccgttgcagatggtttaatctgtgatgccaaaacgattatggcgttgtattactggcaattacaagcaaaataggagcggtagaaatgacgaatgaacctaagacgcgcgaagaatatcgacaacaaaaagaggctgaagaagccgcctttaaacagcgcgatcaagagcgcctcaggacagaacgtgaatatgcacgtgaacaacaaaaagaagcccttaaagcggtgactgaaggcgaaccagaaacagcaacgcgtcggactaagaaagtcgatccaccagcggttaaacgaatgaagaaacggttgaattgggcgattgggattacctttggcttaattattatcgtttacttgattctttttttcctatagaatggtaaagttaatgtttttttagaatggagagaattagtatgaaaattagtgtcatttgcgccatggaagaagaaattcggacgcttttaacaaaattagaagatgtgcaacaacacacggttgctggcaataccttttataaaggtcaattgtacggtcatgaagtgacgttggttgaatcaggaattggtaaagtgcaagctgggatgacgacggcgattttattagccgaagaaaaaccagatgttgtgattaataccggttcagctggtgggattggtgaaggccttcatatcggcgacgtcgtgatttcaagcgaagtcgcttatcacgatgcagaagcaactgcctttggttacttaccaggtcaattaccacaacaaccccaacgatttgaaagtgatgctaagatcgttcaacaaatcgaagcggcggctaaagcggttgacatacaaccacgtgttggtttaattgtcaccggtgatcaatttgttgcgagccaagataaaatcaaggcaatcaaagaaatttaccccgaagcgctctcttgtgaaatggaaggtgctgcaattggacaagttgcaacgcaattcaagattccattcgttgtcattcgcgcgatgagcgacgtcggcgacgaagaagccggcgtaacgtttgacgaattcatcgtagaagcaggccaaaaatcagcagcgatgttgcttaacttcttgaagaatattaaataaaagaagtgcgtcatcaacggttagcttctgagcatttgcataacttaacgaattagcgacatagtcgatgatttgataagtgtagcaaagcgcaggaaactgttgatgaaagcacgttaagaaaataagtgtgttcaaactggttatgttctgaggattagcaaaattagacgaataagcggcgaagccgattgtttggctaattagactaaacgtaggaacatggtttgaaaagcacgttaaaggagtccacccatggaaaaattctgtcaaagttgtggcatgccactgactgcacaaaaccaaggtagtgaacaagatggcaccaagtcaaatcagtattgccaactgtgttacgttgatggtcagtggacagaaccaacaatcacttttgaacagatgcttgaaaaagggattgctgggattcgtgccgaccaaacaaccggtaagatgaaacaatggttcctaattaaaagctatccgatgatgcttaaaaagatgcgtcggtgggcataaagtatcaaaagaaacttatcctaatgggtaagtttctttttttggttaaatggttaaattctgctaaactaacaacaacgttacgaatggaagaggggatgtcaatgacaccagaagtgagccagtattggcaacattttatagaacaacagcagttaccacctgatttacaaccagcggagatttattcatttgggaatacagaacaaatggccaatgaattggcacgattggtaataatcggtcaaaaaacggccaccacttctgcgattgagttgtatgaacccgatgagcatgtcccacaagtgggggattataatgttattttagatggacgagaccggccggttgcaattacgaaaacgataatgtgcacgattgttaagtataatcaagtcgacgctgaacatgcctttttagagggcgagggtgatcgaacccttgcttattggcgttcagttcacgagcctttttttaaagctgaatatgcagaggcagggcaggtgtttacgccgacaattgcctgtttatgtgagcgttttgaagtggtaacggagaggcgtgaattaagatgattcctacacgattgtcagaaggtgatgagattcgggtcatcgcgcctagtaatagtttgcaaagtgttggcggatatgtggctaatcaaccggcgaatgatcgattgagtgcacttggttatcaggtgacgtttgggcagcatgtcttggtaatggaccaattcaattctagtccaattgaagcgcggattgccgatttgcacgctgctttcatagatgacaatgtcaaagcgattttagcggtgactggtggttataacagcaatgagctacttccctatatcgattttgatttgattgcaagccatcctaaaataatctgcggttattccgattttagcgcgctggcaaatgcgatgacagctaagacaggcttgataacgtattatggaccatcctatatttcgtttaaattggtagatcagttgggcgattatcaagcgcataattggcaaaaagtcatgacgcaggaagctggaccaattcggttggcggcttccaaagagtggtcgagtgatgcgtggtacttaccgaatgcagcgcgggattaccagcctaatcgttggtagagttatacgtctggctgtgtaactgggacgttagtgggcggtaatttaaatacactttatacattacaagggacagcctatcaaccggattataatgatcaagtgttattgattgagtgctcagatgggtcagatccgtttgatttttcacgcaatttggcggcattattacagagtatggaacatccgaaggccttgattatcggtcgtattccaaccgatgtcgcgctgagtgagacagatttaatcgctattttgaataagtttccgattttgaagacaatccccgttttgtacaacgttaatgttggtcatacccagccgattttaacgttaccgattggacagtcaatcacggtcaatgcgacagagggatggttacaaatcgaaggcgattaatataaaatgcaaaagcggcggatgacacaaaaattatttttgtgccatccgccgcttttgatatccgcatatttgtgctatcagttatatgcctgcgattaacagtaactacaacacactctctttagagtaatgctaaagttcgttgcagttccggttcttgttcaagttttgcgagtggtaagtcatgggtcacttgatggtcttcattaaagacgaccacccgtttagcgacttgtttgacttgagccaggttgtggcttgcaattaaaatccctttgccggcttgattgagttgttggagcaagtggataatcagcgtttggtaggcggctgataggccgttgaatggttcatcgagcacaattatttcaggattcatcgttagcacactgcccaaagcgacgagttttttttcgccaccggaaagttgataagggacgcgatcagctaagtgttcgatttgtaacaacgcgaggcaatcgtcaacgcgggtttgcacttcatctggggctaagcccatctgttctggaccaaaagcgagttcggcgcgcaccgtttcgttaaataattgaacgtcactattttggaacacaaagccgattgcgcggtggagggcagtcgcctgtgcaggctttttgaggaagcgggcatcgacaagttggtctttaaaataatattgtcctgcgctgggctgaatcaaaccgttaattaatttaaacagcgtcgattttccggaaccattaggccccataaacgcgacggcctcgcctgcatcgatggtaagagaaatatcgttaaggctgtcggtttgcgtataggcgtagtgaatgtgttgcaaattcagcatctgattacctccgaatgaaacagaataggcaaaatagccctagatcccagctgattaagcgccagtcgtagcgattcactgttagcggcgtccgtcgggtgacttgtccggtgtagccccggagaatcatcgcatcgtataaagcggtaatgtagttgcgggaacttaagtagaggcggccaatcagtgaaccgactaaattttgtcgttggtggcttttaccagttgagcgtagccgaattgcccagagggattcttgtaaaaattgggcgagcaagtggctgtatttcagactaatttcgagtgtcaaaatgagcagactggggagtcttaattgacgtaaagcaacaataaaagcgggccaagtgatcgtctcgagaaagaaagcaatatttaataacatgatttcagtccgtacgataaataaaagcgttgtggcgacttggccgagccaaaaattcggtagaattaataaaatcgcaatgatactgatatcaccgacgcgtttaaaaagcggccataaatgctggcttggtaagcggcaaattcgaattaacgtcaataaaccaatcaaccaaattaaaagtagactatgggttaacacgagaatgatgagtgtcaccaataaactaatcagttgaataccaggcgtttgatgggcggttaaaggttgaggctttgtttgattaaagcgccgcagcaaacgatcactaaagcacaaattttgaattaaaaaacggtcgaattgcgcgaccgttttgggcgtagcttccgttgtttgaagccaagttggtaatttaggattgggttgaataatgattcatcaccagttttccgataagataaaaaacaatgacggctgttaccgctgataagatgtagccaagtgataatggaacgccagcaactgtgtagtcactaaagagggcattaaagtttaagccatgggccataccacttggtagactgtgacctaggtgatcatgtttgagttgtgtaacgagttcgcttgcgctccattcgccccaagcagtaccactagctaataggccaatcggcgataagataatcaataggccgatgaaactgtaaagcgcgcgatgtaaacgacggctggtttgtggatcaactgtttgacgtggtgcaacgaacagttcgttaggtgcaacccggcaaatgaattgataaacggcgagggtaaagccggcttcaacccaaccagcgactaataaatgagcgaacaacatggctggaattgcaatgtgtaacggataaggggcatacatgggttggccagctgcgttatgcgcaacgagcggttgcagaccaagttcaataccggccattaatgcggcggcattaatcccgagatatgcgccaactacgactcccactttgggctggtgtgctttttggaatagtcgatagagaccatagccgacaaatggcatgataatggccatgttgaaaatattggccccgagtgcaagaatcccaccatcaccaaataaaaaggcctgcatgatgagtgcaatcgttaccgctagactagcggcgtacggcccaatgagaatcgctaatagggttgcaccaacagcatgggcggttgtaccgccaggaattggcacgttaaacatcatcatcagaaacgatagtgaagcggaaatccctaacatggggaccgtttcttttttttcggtgacttggtatttaactttcttgagtgccaagccaatgactggaatagcggccgctgcaagcacggcacacgtttggggacttaaataattatctggaatatgcatacataaaaacctccactgatttgttctcgactattaaggctacgcgtctcatagccgttttcaatcacgaatcatgtttacatatgttaacaaatcgctaattggcgatattatcaagcaagtaactgacatctttgattaagaatttatgctcggtggtttcaatcacgccgtcttttttgagttggttgagcatgcgattgacactactgcgcgagctaattccgcagaagccggcaatgtcttcgtttgtaacgacgaagtcaatcaggatgccatcgcggcgtttcttaccaaagagatcaattaagctgtataagaaggcacacagcccgccgtttttaccgttcattaccattttttgcaagcgataaatattctcggataattttttgcggtagtaatttttaacgtaattctgtaactcgggggtggcattcacgtagttccagaaggtcacgcggtcaatctgatagaaagttgcttcctctgtttcaacgcgaacgttaaacggttgatccgtatattttgaaatttcatcccgtaaaagtgaaatgacatccggctgggtaatgtaagagagattgaattcacgaccgtcttgtaaaatgatcgagtttttaatcacgccttttttcagaatataagtataccgttcttccaaaccgtggtacgtcaagtatgtgtgcttctttttggtaatcactgggacgtgacgttcctctaaaaagttaattaaaaattcaatgtctgttaaaaccataatgcatctgcctaccctttgtgctgatttattatatctgctaatcattaaataactttaatctaaattatacgtcttgaagactataaggttgttatcatttgttacacctaaaagtaataatgaaatgttgttcataaattataccgcatccttttcagaaaatctgtataactatggacgtagctttaaaaaagcattcaatcagcattgagaaaggaagtcctatagtttggtagccattaaattaccttacgatcaaaaaattatcacggctaatattgcagacgcgaattttgccgggaagcttgtttcacaagctgctacgtatcaaaatccaatgagcgaagccgaaacggttgaaaaatcattggacaatcccattgatagccctaagttagaagagttggctaaagggaaaaagaatatcgtgattatcagttctgatcatacacgaccagttccttcacatatcatcacgccgattttactaagacggattcgttctgtagcaccagatgcacggattcggattttagttgcgactgggttccatcgaccatcaacgcacgaagaattggttaacaaatatggtgaagaaatcgttgcaaatgaagaaatcgtcatgcatgtttcaaccgatgacagctcagttgtgaaaatcggtcaattgccatcaggtggcgattgcattatcaataaagtcgctgttgaagctgacttattgatttctgaaggcttcattgaatcccatttcttcgctggtttctcaggcgggcggaagtctgttttaccgggtgtggcttcatacaaaacaattatggccaaccactcaggtgaattcatcaattcccactattcaagaaccgggaatttaatgcataacccagtccacaaagatatggtttatgccgctaaacaagctgggcttgaattcatcttgaacgttgttttagatgaagacaagcacatcatcggttcattcgccggtaatttagaaacagcgcacaaaaaaggctgtgacttcgttgaaagtttatcagaagtcgacaagatcgattgtgatatcgccatttcaacaaatggtggctatccacttgatcaaaatatttaccaagccgttaaagggatgactgctgctgaagcgacgaacaaacaaggtggcgtgattatcatggtcgctggtgcacgtgacgggcatggtggtgatgggttctatcacaatattgctgacgttaaggatcctaaagaattcttagaccaagcaatcaatacaccacggcttgaaacggtccctgatcaatggacatcacaaatcttggctcggattctggtccaacatcatgtgattttcgtgtcagatttggttgatccacaattaattacagacatgcatatggaattggcaaccagtttagatgcagcgttagaacgggcctacgagattgaaggggcagatgccaaagtgacagtgatccctgatggtttaggggttattgtgaaataacaatagaaagaatgagtagtttggacacaacaaatgagctacaacagcttttagaagctgttgcaaaccaaaaagtcagtgtgacagaagcaacaaagcaactggcacatgcgcagaccattgatgatttaggctttgccaaggttgatttaagtcggcaaaagcgcaatggctatccggaagtgatttatggcgccggtaaaacggcggaccaaatcattggcatcattggttcgttaaaacgacatgccgaaaatattttatgtacgcgagtttccccagaaaagtacgctgcgattcaagaagcggaaccgacagcaatgtactatgaaatggcgcaatgtgtagtactgatggttgacccactaccaaccacggatcactatatcgccgttgtcacagcggggacttccgacatggcagtggccgaagaagcggcggtcactgcagaagtatacggtaatcaagttaaacgaatctatgatgttggtgtggcgggcattcatcgcttgtttgaacatttggatgaaattcgccaagcccaagttgtcatcgtggtcgccggtatggaaggggccttagccagtgtggttggtgggttgatcgaaaaacctttgattgccgtgccaaccagtattggctatggcactaactttggcggactaacagcgctgatgaccatgctcaatagttgtgcgtccgggattaccgtcgtcaatgtcgataacggctttggtgcgggctactcagcaagtatgatcaatcatttaagtgacacggaggatgacaaatgagaactctttatttagacgcattttcaggaattagtggggacatgttcatcggcgctttgctcgatttaggggttgatttcaaacagtttgaaacagaattagctaagttgaatgtccctggctaccacctacatgcagaacggattgctaaaagtagtatttatggcaccgattttgacgtccatttgccagaagccatgcacaaggatgaaggttttattgaaacaacaccggcacagcatcaacatccgcatacacacgcaactggccatgcacacacgcatcaacacgcaaatggacacacgcacagccatggtgatgacgtccgacatttaaaagacattgaagccatcatcgatcacagtgatttaagcgattatgttaaaacgaacgccaaacaagtttttacagaaattgcgcaatcagaagcggtcgttcatgacctaccattaagtgatgttcattttcatgaagttggggcgcttgattcaatcgtcgatattgttggagcgtttgtcgccctcgaattattggcagttaatcaagtctattcatccgaattaacggatgggagtggctttatcaaagtcgcgcatggcatgatgcccgtaccagtccccgctgtgatgcaaatgcgcgtcggtagtgcgattccaattaaacaaaacccagacttgcagaccgaattgatcacgccaactgggatggggattgtcaaaacgattgtcgaccaattctgtccaatcccagacgatcaaacgatcattaaagtcggctatggttttggtaatcgggaaacaccgcaactcaatgcattacgcgtgatgttgtgcgaaaaaaaaaactaagccaacaggttgttaaaaccgataccgatcagattttagtgttggaggccaacattgatgaccagtcagcagaaagtttagcgccggttttggatttattgatggacaatggggcgctcgatgcctttttcagtccaattcaaatgaagaaaaatcggcccgcaattaagctaacggtcatgattcatccagccgatcaacaagccatgacttatctgatcttaaaacacacagcaactgttggtgtgcgttaccagacgatggggcgcaccattatgccacgtcattttatcactgtagccacgcgcttcggcgatattcgggtcaaaatcgtgaactatgacgatctcgaaaaatatagtccagagttcgacgattgtctagctgccgccaaggcgcatgacgtggcacttaatcaagtttatcttgctgtttatcagagtatgcccgagtcgggtctatcctgatgtaacgcgttaaagctatcaaaatttagatattaaatcgttattatttggaggaatttattcatgattcatcagttattagcagaattcatgggcacagcgctcatgatcattttcggggttggggttcacagtgatgaagtcctcaaaggttcaaagtatcgtggctcaggtcatttatttgccattacaacatgggggtttgggattacagtttcattattcatcttcggagatgtttcaattaacccagccatggtgttagcacaatgtatcttaggcaacgtttcatgggcaatgtttatcccttactcagttgctgaagtcttgggcggggttgtcggtgcagttatcgtctatatcatgtacgctgatgaatttaaagcatcagaaggcaatgtcgatcctgttgcggttcgtaacatcttctcaacagcacctggtatccggaatttaccacggaacttcttcgttgaatttttcgcaacatttgttttcatttcatcaattatcgccattacacaaatcaagacacctgggattgcaccaatcgcagttgggttacttgtttgggcaattgggatggggatgggcggtcctaccggattcgcaatgaaccttgcgcgtgatatgggtcctagaattgctcacgcgcttttaccaattaaaaataaagccaactcagattggcaatacgggattatcgtgcccggaattgcaccatttgttggtggtctatgtgccgcactctttatgcggagtttctttggcatctaatttaatcggaggaatcaaccatgcgtgaacaaattaaacaaacgcaaaacatgatggtcgacttattcgaagtcgctgctcatgcctcacaaccggggacaatctcaaccagtttaattgaagcgcaacaagcgcttttaacagcagaacaactttatggtagccttgatgacgcgcaacaaaccgctagtcaatcaactttcaaaaactttgttgatagtgccgcgcatttaaacttgatgatcgtcaagagtttagataacaacgatttggtgtatgccgatcggattcaaaatgaattaacagctttaaaacaattaatctaatgatatagaaagaagtctttaacaatgaatacattatctgaaaaaaaagcaatgttaactgtcagtttacaacaaatggaaaaagtgattgttgccttttctggtgggattgatagcacattagttttaaaaatggctttagaaacactcggcaaagaaaacgtcttagcagtcgttgctaactcagaattattcacagacgaagaatttaacaaagccatcgacttggcacatgatatgggcgcgaatgtcgaaacaacaacattgaactacttatctgacgaacacattgccaacaacacaccagaaacatggtattacagcaagaagatgttctatacacaattgaaccaaattgctgctgaaaaaggctttgaccacgttttagatgggatgatcatggatgataacagcgacttccgtccaggtttacgggcccgtgacgaagctggcgcagaaagtgtccttcaaacagctggtttttataagattgatgtccgtcaattagcaaagacattaaacttaaataactggaataaagtagcgagctgttcagtttcttcacgctttccatataacacagccttaactgaagccaaaattgctcaagtgatgcaatctgaaaaattcttgcgtgatttaggttttgcaacggttcgtgttcgttaccacgaatcaatcgcccgggttgaagtcccagaagcacaaattgctgacttcttaacccacagcgaacaaatcaaccaagcattacaacaagctggttttgaatttgtaacggttgatttagctggtttcaagagtggccggatgaatgaatcattaacagcagatcaaaaagcagctttaatgactgcttaatctgagattaagtgttttaaaggctgggacaaggtatctttgtcccagccttttttggtagcgaaaagtgtttatccgtgctttaaaagcgaactatgttaaactattatagatactttttaaaatgaggcgaaaaattgtgaaacatatttatttagataacgcggcaacgacacccatggccccagaagtcattgcgacgatgaccgaacagatgcaggccgatttcgggaatgcatcgagcacccattattttgggcgccaagcccacacggtgttggataccagccgccatactttggcacagagcattcatgcgaaagataacgagcttatcttaacgagtggggcaaccgaaagtaataacacggcaatccttcagacagccaaactgcgtgctaaagaaggcaagcggattattacaacggcaattgaacatcattccgttttaaaaccgatggcctatttagaaatgcaagggtttgatgtgatttacttacccgtcaacgaacaaggggtgattgatctcgcagatttgaaggcggctttaacgcccgaaacgattctagtatcgattatgatgggcaataacgaagtcggcagtcatatgccaattcacgaaattggtgaacttgtccgcgactcaaacgcctggttccacacagatgctacgcaaacgtatggcttattagatatcgatgtgcaagctgacaatatcgatttactggcagtttcagcccacaagatcaatggacctaagcaaatcggcttcctctatgtcaacgacgcgattcatttaccatcatttgtcctaggtggcgaacaagaaaagaagcgccgcgcagggactgaaaatgtgcccgctgtagctggttttgcgaaagcagttgaattattggccccagcggttaaagcagacctacaagcacggtatgctggattcaaacagcaattactagctgatttaaaagccaacgacattgattttgcgctgaacgcagaaggagctgatcaagtcgggcatgttgtgaacctctggattaaaggtgtttcaacctatgtcttgcagatgaatcttgatttagcaggctttgcaatttcaggtggttcggcatgtactgctggcgatttggaaccctcacacgtgttgatcgcgatgtatggtgaggatagcccgcgcgttgccgaaagcatccggattagttttggtcacgaaacatcgagcgaagacgtcgctgcttttgccgaagcgctcacgaagattgtgaaacgcaatttagcaaagcaagccgctaaggggtaggcagcgtttacgtgcttgtgctaaaatagacttattcagtgtatggaggttaggcagatggctttattaaaaacaacagcaacggttttggggagtacggtgcaatatcgactcaatcccgccgttaaaaaatacacattaagagatgttggctttgtgcccacaaacaatggtaacttccagatggaacggccattagatcctaattcaccatttaacagtgcgattaagttgaagatgacaattggtaaagagttacagacgttgaagatgtctgtcacctctccagatggcttacatccagtcgatattttcaagagtgaaaagaatgctgaaaacgtcgaacaatttaattttattattgctaacttagtggcacgtgaagtgttaattaaagaaggctaaataacgttttaagagcggtttaccaggagtttgataggtaaactgctttttttacgtttaacttatgaaaagtgagtgttttagtttgaaatattaaccaagattgctataatgttaagtactggaattcacgaccttcaaatcgtagaaaactagaatctatttgaaatgatggtgatattgtggttgaccacagtaatacacgagtcgtcgttggtatgagcggcggggtggattcatctgtcacagcattgttgttaaagcaacaaggatacgatgtgattggtgttttcatgaaaaattgggacgatacagatgaaaatggtgtctgtaccgcaacggaagattatgaggatgttgccaaggttgcttctaaaattggcattccttattattccgtcaacttcgaaaaagaatattgggaccgcgtgttcgaatatttcttagacgaatacaaacacggcagaacgcctaatccagacgtcatgtgtaacaaagaagtgaaattcaaggctttcttagattacgcaatggaattagacgctgacttcatcgcaatgggccactatgctcagattgaacgcgatgataacggcatcgcgcacatgttgcgtggcggtgatagcaataaagatcaaacttatttcttgagcgctctttctcaagatcaattacaaaaatcaatgttcccaatcggtcacatgcaaaaagcagaagtgcgtcggttagctgaagaggctggcttagcaactgctaagaagaaggactcaaccgggatttgtttcatcggtgaacggaacttcaagcaattcttaggcgaatacttaccagcacaacccggtaagatgatgacggtcgacggtcttgaaaaaggcacccatgacggtctaatgtactacacgattggtcaacgctccggtcttggaatcggtggcggtggcgaatccaatgatccatggttcgttgttggtaaagatttagacaaaaacattttatatgttggtcaaggctaccataatgaattactctatgctgatcaattagatgcaagtaatatttcttggatcacaccagttgatcatgggacagatttccacgtgacggctaagttccgttaccgtcaacaagacgtcggcgtaaccgtccacatgacatctgacacaactgcaacggttgtctttgatgatccagtgcgtgcgattactcctggtcaagcggttgtcttttatgacggcgcagaatgtttaggtggcggcacgattgacgtggcttataaggctgcgaacgatgatgctgacatgaaagtattacaatatatctaatttaatcgttaaaagtgctgatgaatttatatttatcagcactttttttgtgggtttgttcaataagtggtcaacgaccttttttagaataaaatcacaatataacgtttaaaacataagtggttattcgttttagattgtgaaattaatttaatagctggaggcaattgactttccgaaactaagtagcgtacaatatagttacatgctggttgcgtaatatttcacaaattctcaacgattaaccgtcgttttttggatatttctaggaggtaacatgatgaaagtagcagttattggttgtacacacgcagggacatttgcaacacaagcaacattggcagaacatcctgattgggatgtaacggtttatgaaacacacgataatttatcattcttatcatgcgggattgccctttgggtgggcggccatgtagccgatcctcagaaaatgttctattcaaatccagaaatgttagcgcaagcgggcgctcacatgaagatgcaacacactgttttagaagctgacttagatcaaaaaatattacgcgttaagaacctagtaacggaagaagaaacaaccgaaaaatttgataaaatcatcgtcacaacaggctcatcacctgtgattccaccaattgaaggcattgacaatccgaacgttaagctctgcaaaaactgggcgcatgccaatgaattgaagaagagcgccccagatgtgaagagtgttatcgtgattggttcaggttacatcggtgccgaattggcagaagcctatgcaacaactgataagcaagtgacattaatcgatgcattaccacacgcactcggcaagaatttcgatcctaatatctcagaaatcgtggaacaagattaccgtgaccacggtgtaaccctcgcgcttagcgaaaaagtggtcagtttctcagggacggatcaagtcactgttaaaactgataagaacgaatacacagccgacattgcaattttatgtgttggcttccgcccaaatactggccttttcaaagggcaagttgatatgttaggtaacggtgcgattttgacggatgaatacatgcaaacgtctgttaaggatgtttatgcagccggcgattcagcagctgttcattacaatccaacacaaaaagcagattacattccattggcaaccaacgctgttcgccaaggccttttaatcggccgcaacatcgaaacaccaactgaaaagtacatgggcacgcaagcaacttctgccgttgaattatttggtcgcacctattcagggagtggcctaacagttgaaggcgcgaaagtgcgtgggattgaagtcgctacaacaacgttagaacaagattaccgccctgatttcatgccatcaacgacaccggttttgatgaacttaatgtgggatcctaagacgcgtcaagtattgggtggttcattcacaagtatgtatgatattgctcaagcagcgaacgtcatttcaatggccattcaaacgaagatgacgattgatcaattagcaatggttgacatgttcttccaaccaaactacgatcaaccagtcaactacgtcaacgcaattgcaatgcaagctgtcgcagaaagtaaataaaagagtgtgtaagtaagcgttcatattttgaggattaactggatttggcaaatagggttaaccgcagaaatatgcctactgaaacacgtttagagcaactaatagatgaaaccgctaggataaaaagtatttttatcctagcggtttttttgatggcgttttacaggaaaaatgcttgctttattagtcgattgacttgaatttagggcgtaactctttcataatgaaaagtaagttattttaaggagagaacgcatgacaaccttatattttatccgccacggtaagactgaatggaatttggaaggccgctatcaaggtgcacgtggtgattcaccattattagacagtagttacgttgaaattgaagaattagccacatttttaaagcccattcattttgatcatttatatacgagtccgttaaaacgcacacaggtaacgtctgcggcgctaaaacgagacttagggcaggattttccgattacggttgttgatgcactccacgaatttaatctcggtctaatggaagggatgcgctttacggaagtcgaaaaacaatatccgacaatcgtgaaggcctttcgtgaagcaccagcggagtatgatccaactgaaattaaaggggaaacctttgaacaagtgattgaacggacaacgcaagcaattgacgcgattgtgaaggctgctaaaccgactgatcatattattattgtcagccatggggcagcgatggtggcgatgatgcagtccttactcaagacaccattggctcaggtccgcaaagacggcggtgtgacaaattcatctgtgaccacgatgacaactgacgatcaaggagcatctttcaaactaattaagtggaatgatacacacttcctcagcaagcaattatccgcaacagatacgatataggagatgatcacgtgcaagcaattctagcaaaatgggccgctggcgaccacgaagccgctgttaaagatctcgtacaatatttacaagatcactcagaagacattgaagcttacgttacccttgcgacatttttaacgacgcttaaagattttgaacaagctgaagcacttttgcaaaaagcgttgacgcaatttcataatgaagctgcattgacttacgcattaggaacactctattatcaagcggaagcttatcaacaagcggtgcccttgttcatgcagttggtgcaagactcacaatcaacagatgcgcagtatatgcttgcgcagacatatcatcaactcgaacagaatccacgggcattggcgttcgcgttgaccgttcaagaacaagaaccagaccaactagacgccaatcttttagtgggcgatattttaacgagcttgggtgattttgaccaagcgcagacctaccttaaaaaggcattgaccattgcacctcaaaatggtgaagtattatttaagtatggcttgacgcaactggtcttaggcgctgatagtgagccttatttcgaacaagccaagcactatgcaccggattattttaaaaagaataaacaacagttaattgatattgaaggcttcatgcaggctaaagagcaaaaagaataagggatggcgattgtggatatagcaaaaacagacgaaaccaaaccaacagtcaccggaaccgtccagagtattttctatgagagcccggataatttttttaaaattctactcgttaaagtagcacataagacgattgactggcacgaaacagaaattgtggtgaccgggagttttggcgacattaaagaagatgaacgatataccttctatggcaaagtggtcactcatcctaaatatggcaaacagtttcaagccgataattaccaagtggaccaaccaacgactaaggccggcttagtcgcttatttgtctggcgaaaaattcacaggcattgggcagaaaacggccgaaaaaatcgtggatactcttggaattgacgcgattgataaaatattagaggatccgacggcgttagaaccattggggctaaatgcgaagaaacaagcacaactcgttgaaacgctgacgattaataatgggatggaacagattattattggcttaaacaactatggttttgggagctcgatggcctataacatctatcagacctaccatgaagatacgctgaagattatccaagaaaatccgtaccaactcgtggctgacattgctgggattggctttaaacgtgcagataatttagcggagaccctcgggtttgccgctgattcagccgtgcgggtgcaaggggctttaatgcaagcgttaaatgagttgaccaatcaagctggggatacctatacccaggccaagccgttattggcagctagtattgagttgatggaaaaagcacgcaatgttgctattgatccgaacttggtggctgaacaactgatggcacttgcacatgatgggaaagtcgttggtgatgagaatcggatttatccgaatgggttatttaatgcggagtggcaaattgcgaaccatttaatgcgaattgaaaatgaacgcgatcaacttagctatcctaaacatgatctagatcaagaaattcgccacctcgaaaaacggtttaagatgacatacgatgacgtacaacaagaggcgattaagcttgcgatgactcaccgggcgttcttattaaccggaggacctggtactgggaaaacgacgattattaacggaatcgtgacattatacgctgaattaaacgggctgtcattagatattaatgagtacaaagacacgccgtttccgattttattggccgctccaacaggtcgggccgcaaaacgaatgagtgaaacaacgggtttgcctgctagtacaattcatcgcttactcggaatcactggccgcgaaaataatccagatgtttccggtaacaaagaattggaaggcggcctattgattattgatgaaatgtcgatggtcgatacttacttgtttcgctcattactacgggcggtgcccagtcatatgcaggttgtattggttggggataaggatcaattaccatccgtcggggcagggcaagttttctttgatttattgcagagtaaggttattccagcggttgaattacaacgtatttatcggcaagatgaccagtcaacgattattccgttggcgcatgaaattaatcaaggccaactgccagcggatttgttgaagccgcaaaaagaccgcagtttcattcaatgtaatccgtatcaaattgaatcggtgattgaacaagtcgttactaaggccaaagcgcgtggttttgaaactaaggacattcaagtgctagcgccgatgtacaaaggagcagccggaattgatcagttaaacccgatgattcaaaatatcatgaatccaaagctagatgaccgcaaaaaacaagttagcattggtaacgttcactaccgcattggcgataaagtactccatctggtcaatagtccggaacaaaatgtgtttaatggtgaaatcgggcagattacggggattacctatgctaaaaagagtgcggacaaggttgacgagatcaccattgcttttgatagtgcagaagtgacctataagcggagtgagtggcacaagattacattggcttactgtacgtcgattcataaggcgcaaggttctgaatttgaaatggtgattctaccattggtcaatcaataccaacgaatgctcaagcgaaacttactgtacacagcagtcacgcgggctaaatcattgttgattctgattggtgaaccgagtgctttccaaaaagcagctcaggaactttcggccaatcggcaaacgacgttaaaagaacggattcaaagtgtctttaacggtgaacaactcagcaccgccattaagacggccagtgtggggcagacagaagccaaaataattgttgaccagccggcaccaccaagtgcgccagaaacggctgttgatgaacaactgaacttagtgccagaagacgacgacgcaatacaagaaacgccaatcagttatgtcttaacaccgactgttctaacgcaacagcaagtggatccaatgattgggatgaccggggtgacaccgtacgattttatgccgaaatcaaaatagtgtataatagggtaaacaactaacgaaaaatgaggcgaaacaatggttgaccagcgatctaatttagagattagacccgtgacaattgaacatttagaacaatttaatgacttattacggtatgtttttcaagtcaccgatcaggaagtttctgatagtggctacgaagagggcgaattagaacgcgccaaacgtcccgtattagaaaaatctgacgtaatcggatggtttaatggggacgaactgatttcacaattagccatctatcattgccgcgtgaacattcatggccaggtatttaacatgggtggtttgactggtgtcgggacttacccggaatatgccggtcatggtttgatgcatgacttggttaaagtcggcttgaacaagatgcgtgagaataagcagtggatatcgtatttatatccatacagcattccgttttatcgtaagaaagggtgggagatcatgtctgatcacctaacttatgatattcgtgatagccaattacctaagcaacggccggtaaatgggcacgttgaacgccttgatattgacgatgaagacgtgattaaaacgtatcaacggtttgcactaaaaaatcacggtgcaatgattcgtaacgaactgaactgggatgaatattggcgttgggaaaatgaagaagaacggattgctggtgtttattatgatgaaaatgaacaacccaccggctatgttttatactggattgccaacgaagtcttccatattaaagaaatgatttatcttaatcaagaagcccggattggtctgtggaacttcattggcgcgcattattcaatgattgaacatgtcaagggtaatcaatatcaggatgaaccgatttcattcttattagaagatggtgatattgaccagacgattaagccatattttatggcgcggattgttgatgtgcgtgaattcttgttggcttatccgtttgaaacggacgggcaagcattccacattgaattgaccgatccattagctgaatggaataacggtacgtttggcgtttattgggatgaacaaggaaaagtgcaggtcacaagtcgcccagtcggtgaacgaattcaatgcgacatccagacactaacaacaatgctgatgagctatcgacgcccatcatacttggcaaagattgaaagactacaagccaaccgacaagcactaaaaaatctcgagaatattattccaatggaccaaccatacttctcggattacttctaaagaaatgagtgcattcaagtttggtcaacttttgtgcactagccttgtgttgctaggcataggaacatgatttgaagagcacgttaaaaggcgctgcccccaacttggaggcagcgccttttatttatttatgcttgcttctttagccaaaatgcctggcttttaagactatagtgaatatcaaatgtccggctaccaagttcttcaccgtccatttgcccgaattctaatgtttttgtttgaatcgctaagttggttccttcaaagtgatgcaccgcttgatagcgtgtgtgccgaccaaacagcatcatcacaaaaagatagcaaaagaaaaagggattcaatttttcaatcacaattaaatcaagttgatggttgtcgaccgttgcgctaggcatgatggggacccctccgccaaagtagggatggttagtggtggtcactaaaaagccacgtttaaaataatgattttggtgatcagccgtgacggtgacttcaaacgcatcttggtgcataaaaactttaaccaatgagctgatgtaagctaatgagcctaagtgcaatcgatttaaaagtcgtttatgatttgaatgattggtggtgctgaccacgttggcatcaaaaccaatccccacattgttaacgaagtagccatggtcgttcttcgttgtgtcatgataataacctaaatcgatggcagttggcattgtggccgacaagatttgttcgagtgcggtcaatggatcacgactaatcccgacaccacgggcgaagtcattacccgatccacaaggaatgtaagcaatcggaatatcgccgcgctgagcattctggagaccattgatggcttgattgagcgtgccgtctccaccaataattaataaaatttgatccgtgtacttaaactttgcaaattggaaggccaattgggtcgtgtgacctgcgtagtgggagagttgaaggtcatagtgaatttgtttttgttttaattgagtttcaattttaggccagatactcgctgcctgaccggtaccggcaacttggtttaaaatgatgtaaaaatggggattggagggcatgaacaagccgcctttcagaaaaagtaatctgttgtatattatagcggtttttaccaaatgttgacaataaaaacttgcattaaacaataaaaaaagcgccaggtcatatattgacctggcgcaaaacttattattctgtactttgaatgatcattggtaaaatcattgggcggcgttctgttttttcaaacaagaagtcttgtaagccatcaatgattgcttcgcggacttggttttcagtgaccttgtcgttagcgttaaacgtattgacgatcattcggaaaactcggcgttgggcttcgctaatcaattcacctgattcacgcatgtagacgaaaccacgggagaggatatctggaccagcgagaatgttcttttcaccaagattgatagttgccacaacaacaaccaaaccttcttctgagagcattttacgatcgcggagcacgacattgccaatatcgccaattccgttgccatcaacgtaaacgtcttcggcgctaaagtgaccagcaacccgtgctgagtcagaagtgagtgctaagacgtcaccgttttcaaggatgaagcagttatcaggttccacaccacattgttgagcgagttccgtatggattttttgcatccggtattcaccatggcaaggcatgaagtacttcggtttgattaaccggagcattaatttttgttcttcttgaccaccgtgacctgacgtatgaatgttattcactttaccgtgaataacttcagcaccagcttctgaaagcttattaatcacgtggttaacgctcattgtattcccaggaattggattacttgagaaaacaacggtgtcgccaggttgaattgaaatttgacggtgagtcccattggcgatccggcttagagcagccattggttcaccttgagatcctgtacatagaatcatcactttgtcggcgggcaacgaatttaattcattggcatcaactaaagcttcatcgggaatatttaaataaccgagttcacgaccgttgacaaccgctgcttccatactgcgaccaaagacggcaattttacgaccgttagcaatcgcagcatcagtggcttgtgagacccgtgaaatattagaagcaaacgttgcgaaaataatgcgaccttcaatgcgttccacaatatggcggattgaagtgccgacgaaacgttctgactttgtaaagtttggtacttcggcattggtactatcagacattaaacataaaacgccttcttcacctaaacgtgccattttttgaagattaggggaaggttgattaccaaccggggtcaagtcaaacttgaaatccccagtttcaacgattaccccttgaggtgtatgaatcgcaacccctaaagtatcaggaattgaatgggtagtccggaagaaatcaacacttgttttgcggaatttaaggacggtatcttcgtttagttcgtgtaattctgttgaccgcaaaaggccgtgttcttctaacttaccgcgaatcaaggcaagtgccaatggaccagcgtagacgggtacattagggacttgttgcaagaagtaaggtaaaccaccaatgtgatcttcatgcccatgggtaatgacgagggctttgatcttttgttgatttttttgaaggtattgatagtctgaaataacataatcgatccctaagagttcatcttcggggaatttaatgccggcatcaatcacaataatttcgtcttggaattgaacaccatacatatttttaccgatttcaccaagtccccctacggcgaaaacggcggtttcgttattcttaatatcgagtttcatttaattaaaactccgttaatttaaaatcttctgattcttgttcaaaagcaaggtgcttaccagataattcttgtacaaattcaatattgtagggagtattgtcttcaacaagttggcgtgcttcaacggcactgtctgcttctaaatagatcgatttagttgcctcgcgtagagggctttgggttttgtctgcttggaaaagtactttataaatcaattgtaaaactcctttattattcatcatagttttaaacgaaagattaaccgtccaggggttgattactcaacatttaagaatattttagcatatcttttcggtaaagtatacattgagcgacgtgctctaaatagcgtgtttgcctcgattcggttataattatcatattagtgagcaatagaagtgggggattgttatgttaatttggttgtcagtcgttatcattgtcgcgttagcgctttttttaacctggttgattaaacggttacgccgacaaagagcgacgcggattttacaacacagtagtcaagaaattgcggatgaaattgcaacggtggcttatcaaaaaatgcaagcgagtcagccggatttttatgcaccgcaagccaaactggtttcgaacctgcccactgaaatttggggcaataatgtgatggtcttcgaataccaagtgcccatccgacaaacatcatctgcattaaaggatgtggcagccgcaattgaggaacaactcaatgaagtggcttacgaacggcggattgcctccgtcagtccgcgttatccggctttgctagtcactgatgtgtggtttttggaaaaacaattgcattttgacgttgcttttattgtcaatcgcgaaacaatcgagtatgttaaagatatggcacaggtagaagattaaatttgaagtttagaaggagtttgcaccgatgaaattaatgtggcgctatacgatccgatataagaaattactattttggaactttatttgtgtatttggatttattctaatcgaattgggattaccaacgttattaggacaaattattgataaaggaattaatcaacatacctttggtcctgtgtggcaatttgggttattgatggttggaatctgtttaatcggactaattggcttaattggcttggcttatactggtagcaaattaaccaccaatatcgtccgtgacattcgtaacgatatttttaaacaaaccatgcagttttcccatagtgagtatggcgaatttggtgtgtcttctttgattactcggaccactaatgatgctttccaggtgatgcaatttatgacccaagtgttgcggacagggtttatgaccccgatgatgatcgtcgcgagtgctttcatgattgtacggacaagtcaatcgctctcatggattgtatttgcggcaattccaatcctgctaacgggggttgtcttgattggtcgcgtttctgaaccgatgtcgacggaacaacaaaaaaatctggatgcgattaatctgaatctgcgtgagaacttgactgggattcgtgttgtccgtgcttttgtgcgggaacaattccagaaattacgctttagaaaagtgaatgatgactacagtcatagttctatccggctgtttacgttggtggctttagcacaaccgggcttttcgttcatctttaatatcgtattcgttctaatcatttggcaaggggctgttcagattgatggtggtcacttagcggttgggacgttgattgcgtttattgaatatattttccacgtactgttttcatttatgttatttgccagtgtcttcatgatgtatccacgggccgctgtttcagcagaacgaattgaaaaaattctgaatgcgccaattaatattaccgaaaaagaagacggggtaacaacaaccgacacacaaggtgaattggtgtttgataatgtctcctttgcttatccaggtccgactgaaagtccggtcgttcgggatgtgacgttccaagcgcatccgggtgaaacggttgcctttattgggagtaccgggagtggtaagtcaacgttgattcaattgattccacgcttttttgacgtaacacgtggatcgattaagcttgacggtcatgatgtgcgcgactatcaacttaaggcgttgcgccaaaagatcggttttattccacaaaaagcggtgttatttaccggaacaatcgcggaaaacttgcgttatggtaatccgaatgcgactgatgaagaattatggacagctttgaaaattgcacaatcagatacctttgtcgctgaaaaaccagacggcttacaaacttatttagccgaaggtgggagcaatttatctggtggtcaaaagcaacgtttggcgattgccagagcgattgtccgccgccccgcgctttatatctttgatgatagtttttcagcattggattataaaacggatgcggcgttacgaggtgcattgaagtcaatcaccaaagaggcaacagtgctgattgtggcacaacgagttgggactatcatgaatgctgatcggattgtcgtcttaaacgaaggtcaagtggttggtattgggactcaccgcgacttattaaaagataacgagatttatcgtgcgattgcggcatcacagttatcacaggaggaactcaatgaagaatattagagaacttaaacggctaatgcgctacattgggccgtatcaagtgacattttggcttgcgattaccgcaactgttatttcggtgctcgctaatgcactgtggccagtgatcatgggactagccattactgaaatcagtcggaatttagcacaacacgttgcgattaattttagttatatcgcgaaggtgattgcgatgattttgagctttgcgttgctatatcaagtgacgatgtttttaggctcgttttggatgacgcgggctgttcaacgggcgatgcgtgatttacggcgcgacattgatttgcaaatcaatgcgctacccgttcgtttttttgattcacaacaacaagggaatatcttgtcacgggtaaccaacgatgtggacgcgattacgaacgctttacaacagagtttaattcaagttgtgacatcgatcttagggatcatcacggccgtgatcatgatgattacgattaatatttggatggcgctcttatcattaataatgattccagcatcgttattgatttcaagacgggtcattcagaaatcgcagccgtactttagaggacaacaagacacgttgggcgaaatgaacggctttgtacaggaaaattatggcggcttcagtgtcttgaaactttacggacaagaagaacgcgcaattgctgcttttgcagaaattacggatcggttaactgactatggctttaaggcagcctttgtttctggcttgatgatgccgttagttggtttaacgacaaacatgacgtatgccgggatggcaacgttaggtggttattatgtcttgcacggtgtgatttcagttggtaatttacaagccttcattcaatatatttggcaagtgaaccaaccaatctcacagattacacagttgtctggtgtgattcaatcagctgctgctgcaactggtcgtgtatttgaaatcttagatgagccagttgaagcaaccgataatgaaacagcatcgttgccagcaatcgttcaaggtaaagttgaatttgatgatgtcagtttcagctataacccagacaaaccattgattcgccatttgagctttactgctaacccaggtgataaagtggcgattgtcgggccaaccggtgctgggaagacaacgatgattaacttgttgatgcgtttttatgatgtgacatctggaacgattcggattgatggggttgacacgaagcaattaagcaagcaacaagtccgttcccaatttgggatggtacttcaagatgcttggttatatcatgcttcaatcaccgataatattcgtttcgggaaactcgatgcgacagagtatgaagtcgttgatgcggctaaaaccgctaatgtcgatcattttatccatacgttgccaaacggctatcaaatgacgattgatgaagaagcaagcaacgtttcgcttgggcaaaaacaactattgacgattgcccgagccgtgattgcggatcctaagattttaatcttggacgaagcaactagttcggtggatacccgattagaaggtttattgcaaaaagccatggaaaaagtcatgcaagggcgaacgagtttcgtcattgcccatcgactctcaacgattcgcgacgcggatttgattttagtgatggaccatggtcaaattgttgaacaagggacgcacgattcgctattagctgccggcggtgtgtacgctaatttatataacagtcaatttgccgatacgcctgaagcggcggaagcataaaaaaagcatgatcgaaatcttctaatgagatttcaatcacgcttttttatgtgcttctcgagtagcctttaccgttaagcctcaaagcctgaccaactcgaatcagcacttcttctttaacgtgcgcttgggtgcaacaactcccgtttaatctaaaattggcagttatcccacaattcgggataactgccaattctgtattaatgctcagttgctaagcacaaccaatcgcacttctattcaataataatcatgtcatctggtgctgcgaatgggtcttgcttgttgatgtgatcgaagaacaagatgccatttagatgatcgatttcgtgttggcacacaatagctgggtagttttttaagcgaatcttgtggctttcaccgtctaaatcttggtaacgtagtgtaatacggtcagggcggggcacaaagccgggcacttcgcggtcaactgataagcaaccttcaccttcagcaagtgctgcgttttgaacagagtggctgataattttagggttgataatcacatctttgaagatgggttcgtctggtccagggaccaagacagcagacatttgttttgaaacatctacttggggtgcagctaaaccgacgccagcgcgcaagtggtacttttcagcaagttcaggatcctggctattttctaaaaatgccatcatgtcagcggcaagttgccgatcttcatctgatagcggaaaagtaacaggttcagctatttttctaagtgttgggttaccctcgcggataatatctttcattaatatcacagttaagacctccgattaattcgtcattcattattctagcacaattcaagttaaaacggaatgaattgcttgacctgctaaagtgaaacgggtagtataagagtatagatatattgcttttccgttaggtgaggctcctatatgaacaaacgctgctactcagaaacatcgagagatgccaattgagtcaactgaaactgccaatgaaggctttttctaacgtagctgaacatggtttctacgtcatatagtgctaaaactgaacgattgggaacgccatgataaatggatgacgctcaattgttgtgcgtctttttttgtcggataaagcggtatgactaaatttaaagtagagaaagtctggtgagtaaaatgatgaaaacagctgaaggacctgtaagtagtagcgatggtgatcattcgaggtggtctgtcattttactgccagcattaggctagcggtttacgacgacttcctcaaaagggaaggagtgtcgaacgcgatgcacaagaaattaaaaaaagacgttaacatcactggcattacaagcagtgggatgttaatgcgtttattggcaactcggccaagtggcttaacaactgtcgaagctgctaaaagagaagcagtattagaaaattcacaagcacgggttagcgttatgcgtgatggttttttacgcttaatcggtgcagatcaaattgtgcccggtgatattttagtattggctgctagcgaaaagacacccgttacaatcgcaacagttaacaaagatgttaacgttattgaagcgggcgaagcagtgactgaaatggtgcacggcgttgtgctagatgcaacgattggtgctaaagcacaaacacctaaagttagagtgggaagcacttttatgatggcggtagctgcattggtttcgttttgtgcagtattaatggttaatcaattcgctttcatgggcttggcaacgttggttgtcggggcaatcctgctgacaatgattaagttagtcaaccttggtcaaattaaggttgcgattgatttaaatgatttgcgggtaagtgaacggtgcgtgcaagtcagtcaacaaattaaaccagtagtcagagtgtttcaagagctcttagtgcatgctggcaacgctgagataccccaaccggtcttggcatagaactaccccaacttaaatttaacgatgagtctgctacggcggactctttttttgtgcctattatttgctattatataacagaaaacgaaattaaattataacagatatagaacagacgtgaaaattagctaactagtgattagattcacatgtaataaaaactaatgaaagcgtaaactgactaatatagcttataaaacgcttgcatttagtgatgtgaaatgctaaattagtcttgtaaagatgcttaagtaatacagatataagcagtcattaaaacagttttttaaagaggagatatggatactatggtcaataataaagctgcagttaattttgaaaagttattgagcgatgagagccaagattttaagaccgttcaaattttagatgagactggccaggttgttaatccggaattgatgccggatctcagtgatgaccaattggttgaactgatgaaacaaatggtttggtcgcgtgtgcttgatcaacgagcaactgctttgaaccgtcaaggccggttaggattttatgcaccaactgctgggcaagaagccagccaattagcaagtaactttgcgatgactaaagacgactttttattccctggttaccgggatgtgccacaattagtgcaacatgggctacctttatcacaagcattcctatggtcacgaggccatattgacggtaacaagtatccagaatctttgaaggcgatgccaccacaaatcattatcggcgcgcaatacattcaagcaatgggtgttgcggttgggatgaagaagcgccaatcagaaaatgctgtttacgtttataccggtgacggtgggacttcacagggggatttctatgaaggcttgaactttgcgggtgcttttaaagcaccagccattttcgttgttcaaaataacggctttgcgatttcggtcccacgtgaaaaacaaacagctgctgtaacgttggctcaaaaaggggtcgcagctgggattcctgccattcaagtcgatgggatggatccactagcagtttatgaagtgatgaaagaagcgcgtgaatttacaactgctggcaacggaccggtcttaattgaaacattaacctatcgttatggaccacatacattatcaggggatgatccgactcgttatcggaccaaagaaacagacgatatttggttgaaacgtgatccactcgttagaatgcgtcgtttcttaactgataagggactttggtcacaagatcaagaagaccaattgatcgaacaagttaaaacagacattaaagcagccatcaacgaagcggatgctgcgccaaaacaaaaagtcacagatttcttgaatgttacatttgaagaccaaccacaaaacattaaagaacaaatcgcagagtacagtgcaaaggagtcgaattaagatggcacaaaaaacgatgattcaagcaattacaaatgcgctggatttagaacttgcagatgataagaacgtcttgattttcggggaagatgttgggaagaacggtggggttttccgagcaactgaagggttgcaagctaaacatggtgaagaccgcgtttttgatacaccgttagctgaatctgggattggtggtttatcaatcggtttagcactagaaggcttccgccctgtacctgaaattcaattctttggtttcgttttcgaaacaatggattcgattgctggccagatgtcacggacacgttatcggatgggtggcacacgcaacatgccaatcacgattcgtgcaccatttggtggtggcgtgcataccccagaattacattcagataactttgaaggaatgatcacgcaaattccagggattcgcgtggttgtgccaagtaatccatatgatgccaaaggcttattgatttctgcgattcgttcaaacgatcctgttttgtatcttgaacacatgaaattataccggtcgttccgcgaagaagtacctgatgaatcttatacagtgccgcttgataaagcagctgtggttactgaagggacagatgtttcaatcatcacttacggtgcaatggtgagagaagcgattaaagcggccgaaaacctagctaaagagaatattaaagctgaagtaattgatttacgaacaattgcaccattagatgttgcaacaattatcgcctctgtcgaaaaaacagggcgggtcgttattgttcaagaagcacaaaaacaagcaggcgttggggcacaagttgcttctgaaatttcagaacgtgctgttctttcattggaagctccaattgcacgtgtttcagctcctgatacgccattcccatttggacaagctgaagcaacttggttaccaaatgcaactgatattgaaaataaggttaaagaagttattaacttttagtcgataacgaaagaagggacgttagacgtatggcatatcaatttaaattaccggatattggtgaagggatcgcagaaggcgaaattcaaaaatgggcagtcgcagaaggtgacacgattcaagaagatgatgtcttacttgaagttcaaaatgataaatcagttgaagaaatcccatcacccgttagtgggaaagtcgttaaaattttagtcggtgagggtgaagtggcaacagttggccaagtactggttgaaattgacgcaccaggtgttgaaggtaacgatacaccaagtacggcaacaccagctgctacacccgaagcagcaccgactgcaaccgatgcaggtggtgtttaccaatttaaattaccagatattggtgaagggattgccgaaggtgaaattcaaaaatgggcggtcgcagaaggcgataccattcaagaagatgacactttattagaagttcaaaatgataaatcagttgaagaaatcccatcacctgttagtgggaaagtcgttaaaattttagtcggtgaaggcgaagtggcgactgtcggtcaagtattggtcgaaattgatgctccaggtcacaattcggcaacggcaacatctgctgaacaagcaccagctacggcgtcagaatcaacaccagctaaaacaacggcgccaagcagtcaagcagtagttgcgattagtgaccaaaatcggacgattttagctatgccatctgttcgaaaattcgcacgtgaaaacgatgttgatatcagtcaagtgccagccaccggtaaacatggtcggattactaaagaagacgtgcaaatcttcatgcaaaatggcgctgcaacaacgacagcacctgctgtagagacagcagaacaaccaacgtcgccagcaacaccagttgcacaaccagttgctgcgacaccatacacctctgttacaccagaacgggaaacacgtgaaaaaatgtcaccaacgcggaaagcaattgctaaagcaatggtgacaagcaagcatacggcaccacacgttactttattcgatgaagtggaagtttctaaattgatgacccatcgtaagaaattcaaggatgtagcggctaagaaggacattaagttaaccttcttaccatacatcgttaaagctttggtaacggtcttacgtgacttcccaactttgaacgcgtcaattgatgatgcaactaacgaaattgtttataaacactacattaatgtcggaattgcaacggatactgatcacgggctctatgtcccaaatatcaaggatgccgacagcaagagtatttttgccatcgctaaagaaattggcgaaaatacgcaaaaagcattggataacaaattgaaaccagctgaaatgagtggtggttcaatgacaatcagtaatatcggatcaattggtggcggttggtttacaccggttgttaactaccctgaagttgcaatcttaggggttggccgaattgggacagaaccaatcgtcaacgctgatggtgagttggctgttggcaaagtcttgaaattatcactatcatttgatcatcgtttaattgatggtggaactgcgcaacgtgcgatgaacgaattaaaagaattattagctgatccagagctattattgatggaaggatgattttaaaatggttgtaggtgattttgcaattgaattagacacagtagtcatcggttcaggtcctgggggctatgttgcggcaattcgcgcggccgaaatgggtcaaaaagtaactgtgattgaacgtgaaacaattggcggtgtttgtttaaacgtcggctgtattccttccaaggctttgatttcagctggtcatcgactacaagaggcgaaagattcatctgtctttggtgtgacgactactggagcaacattggattttgcgaaaacgcaagactggaaacaacatgaggttgttgaaaaactaactggtggcatttcaatgttgttcaaaaaacacaagattgatgtgttagacggttcagcctttttagtggacgaacatagcttacgcgtgattaaagaagagagtgcacaaacgtacagttttaaaaatttaatcattgctactggtagtcgtccaattgaaattaaaggcttcaaatttaataaacgggttattgattcaactggtggtttaagcttaacggaagtaccaaaagaattagtggtcattggtggtggctatatcggctctgaattagcaggggcctatgccaacttaggtgcacatgtgacgattctcgaagggacagactcgattttacctaacttcgaaaaagatatggtgcaattggtgacaaagaacttcaaggctaaaggggtcgatgtgattactggcgcaatggcaaaagaagctgttgaaactgatcaaaatgtgacggttaaatatgaagtcggcggcaaagaagaacaacttgttgccgattacgtgatggtgactgttggtcggcggccaaataccgacgaaatgggactcgaacaagccggtattaagatggctgatcgtggtttgattgaagttgatcaacaaggccaaactaacgttaagggcatctatgcgattggcgatatcgttgctggagcagctttggcgcataaagcaagttatgaagctaaagtggctgcagaagccattgccggtaagaaagtaacggttgattaccacgcaatgccagctgtttgttataccgatcctgaattggcaacgaccggtttaacggttgcagaagccaaggcaaaaggaatgaacgctaaaggatttaagttcccatttgcagctaatggccgtgctttatcattagcagatacagaaggtttcgtgcggttagtgacgaatacggatgacaacacagttctgggcgctcaagttgctggcgttggcgcgagtgatttaatttctgaattgacgttagccgttgaatcaggcatgaatgcagaagaccttgctctaaccattcatccacatccaacgttaagtgaagcgattatggatgatgccgaattagcattaggattgccaattcatatttaataaatagtttagaatgacgacgcaccagttgagtgcgtcgttttttgattccgctatttctaaaaggattcgacagcttctaaaaaagtgcgttataatatgagagattaatggcatcagttgaattgaaactggcgcaaatttatgcaaattttaggagcctttatgcaaacgaactatagttatcctttagaaccagactggacgccaactgaagttgtccaagtcatgaaattatataatcttgttgaacaagcttatgaatttggtgcgaaagttgcggatttacaagctgcttatcgtgacttcaaagtggttgttcaaagtaagatgcaagaaaaacaaattgataaggccttttcagaagcgtcaggctattcaatatatcggtgtatgcaggctacaaagaagagtagtcgaacccaaatcaaaatgacgcttaattagtgaaagtggatgaaaaaatggaacaagaagcactgtatcggttaagtcgttcgctgcaaaagtggatccttgaagcagctgcctatacccgcacacaaattaaacaaccattaacggttagtactaagtctgggcctaatgatttagtgactaatgtcgattgtgctaatcaagctttcttagctgaaaagattaagacggcttatccgaacgcgcaattagtgggggaagaaggtgccggtgaggtgcctgatgattggcaacagggactaactttttttattgatcccattgatggcacgatgaatttcgtgaagcaacgggcaaatttcgccattatgatcggcgtttatgaagacggtcagccgctattcgggattatttatgatgtgatggccgatcaattgttctggggcggtccacagttgggaatattcgaaaacgaagctgccctcaaaaatgctgtcgacgagccgttgcaagaagggttaatctgtgtcaatacacggatgctggtcaccaatgaagcacacttgcaagaggtgttgtatcaatgttcgggtgtgcggatttacggtagcgccggtatcactttcgcccatttgttgaaggggcaagtgcaagcttacatctccaaattagcgccatgggacattgctgcaggtcgggttttagctgagacgttaggttttcaagttttacaatttgatggtcaaccaatttccatgatgcgaaaagaagggatgattatcgcgccaaagcaagcaatacaagaaattgtcacgattatgaatggttcaaatgattaaagataattaaattttcatgaaaaaaacttgcgtattttcaaaaaaacgctaatatatgaagcacagcccatttttttatggtaaaataatagcttgtatacatgagacaaacaacactagtcaagtcactagcgagaggaagctgaaacacttgaaaaaaagagaagacattcgcaatatcgcaattatcgcccacgttgaccacggtaaaacaactttagttaacgaaatgttaaaacaatcagatacattggatggtcacgcagaaatttctgaccgtgcaatggatacaaatgatatcgaaaaagaacgtgggatcacaattctttcaaagaatactgctgttaaatataacggcaaacaaatcaacatcttagatacaccaggacatgccgatttcggtggtgaagtggaacggatcatgaagatggttgatggtgtgttattagtcgttgatgcttttgaaggcacaatgccacaaacacgttttgttttgaagaaggctttagatcaacatttaacaccaatcgttgtgattaacaaaattgaccgcccaggcgctcgtcctgaagaagtcgttgatgaagtgcttgaattattcatcgaacttggtgctgatgaagatcaacttgaattcccagttgtgtatgcaagtgccatcaacgggacatcaagtcttgaatcagatttagatacacaagcccatacaatgaaccctatctttgacacaatcttagatacaatcccagcaccagttgataatagtgacgaaccacttcaattccaagtggcaatgttagattataacgactatgttggccgtattgggattggccgcgtttctcgtgggacaatcaagatcggtgatcaagtttctgttcttaaacttgacggttctgctaagaacttccgcgtaactaagatttttggtttcatcggtttagaccgtgttgaaatccaagaagccaaagcgggcgatttaatcgctgtttctgggatggaagatatctatgttggggaaactgttacaccagttgaccatcaagaggctttaccaatcttacggattgatgaaccaaccttacaaatgacatttgctgctaatgattcaccatttgttggccgtgaaggtgatttcgttactggtcgtaagatcgaagaacgtttacgtcaccaattacacactgacgtttcacttcgtgttgaagataccgacaaagccggcgcttggattgtttcaggtcgtggggaattgcatctttcaatcttagttgaagaaatgcgtcgtgaaggtttcgaattacaattgtcacgtccagaagttatctatcgcgatattgatggcgttacatgcgaacctttcgaaatggttcaaatcgacacacctgaccaatatacaggctcagtaatcgactcaatggcccaacgtaagggtgaaatgcaaaacatggaaagtgatgctaataaccaaacacggatgactttcttagcaccttcacgtggtttaatcggttattcaacagaattcttaacgatgactggtggatacggaattatgaaccataccttcgaaaaatacatgccagtgattaagaactgggaaccaggccgtcgtaacggtgcattagtttcaatcaatgcgggttcatcaacaacttatagtttacaatcagttgaagatcgtggccaattattcatcggcgctggcgttgatgtttatgaaggcatgattgttggtcaaaacagccgtgatacagatatcgccgtaaacgttactaagggtaaaaacttaacgaatacacgtgcttctggtaaagatcactcagctgccatcaagacacctaaagaaatgtcacttgaagaatcaattgaattcttaaacgatgacgaatactgtgaagtaacacctacttctgttcgtttacgtaagaagattcttgacacaagtatgcgtcaaaaagctgataagaaacgtaaaaaaggttaatcattaaaaaccattagaggtagccgcttggctacctttttttgtgcataaatatggtataataacgaacagagtatgctttttaataacgaataggtaggcgtaaattatgattgaacaaaaaacaacagcttatctcactttagaagcggatgcgctacgcattgagcaactattgcgtgctcaaattgatgcgctttgtatgagtcaatgtccaattattgaagaggtaattgatacccaattatttggtttctcgcgcgaggttgattttgcaaaacggatgcaacttattagtgcgccacagggtgcaactttgatgcgtgagttagaagaacgggtcaatcaaattggcatgcaagttgggcaaggacaggctgaatacgaacgaaatagaaattaggtgtaactgtgtggaaaaagtttcaaaaaagtaaaattcagtatttagactattggttattgctaccatatgttatcttatgtgcatttggtgctttaatggtctattcggcgagttcggatttaatgtcaattcgcggaatgaaaccagatgcgtattttaccaagcaattagtgtttatcgcattaggctttatcttgatgatgatcacatattttcttaagttatccgttttaaaaaatcgcacttttctaaaagcaatgacgattgtggttttcttggcgctcatttatttattgctgttaagtcgtttcagaccaagcgcagcgattaatggggctaccgcgtggattcaattgggaccactgaccattcaaccgtcagaatttacgaagttattgattgttatttaccttgctaatatgctctcgcgtaaggaaaatgaactggccgacggatttgttgataatttaaaattattctttagtccggttgtattagtcgctggaatcatcctactggtgtttattcaacctgatttagggggcgctagtatcttggctgctgtgatggtagtcatgttttttggcaccggtatgtcatattggtatggtttttcgctgattacagcggtcacaacaacggttatgattttatttagtattttacggcactttaacttttcaacgaacgttaattcttataagttcaaccggattttatcgtttttacatccatttgaattggaaaatatgggtgggagtcagttagtgaattcctactatgcgattaataatggtggttggtttggcttggggcttggcaatagtatccaaaagcgcggttacttaccagaaccgtataccgattttattttatcgattaccactgaagaattaggtgtgattgggaccctcgtgattatcgcgttactatttgcgctactagcacggattttttacctagggattcatgcgactaagatgtatcacactttattatgttacggaattggcactatcattttcgtgcaaaccctattcaatgttggtgggttgctaggaatcttaccgattactggggtgacgttaccgttcatcagttatgggggatcaagtatgatggttctagcgattgcactgggaatcgtgttgaacatcagcgcacaagagaaaaaagctgcggcagcgaattagtgaggtgaaagcatgataaaaggggcacgccgattaatcgttgcattgattgtctggttggtcatcctttatggttggccgattatccaaacaccagcggttaatcagcctaaggttgcacaagccccgtcgactgaacggtcaataaaacaaacgccactgacgaaaacacaagggccggcgaaactgattaatcaaccagctgaacaattaattgcaacctatgggcaaccggtcgagcaacagctgactgatgaaaatcaacgacggtggttatttcacttagatagccgacagtatgtcgaagcgctgattgataaccaatccaatcaaacacaacaaatcatggttgttggtgcggacaacgatgtggcgccgtttcatttttttcaaaagcgggctacattaactaagaagacggcgttaccaacttcgctcttagtgacgttacacgagcaacaatttaagttgcggttaacgccggagcaacaccaacaaacgccgttagtgatgtttaaaaaccagacgtttgcaactttagtgatgcagcaagaacgattgacagctgtgatgtatttaaatgcgaaccgactgctacaaactgatttatatcgagttgtttcaaaaacaccagtcccagtggatgagctagcaaagtcgcaacaaccgcaaacagatagtcaacgacaactcgctttggtgcaaacgttgcagacattacgccaaaataatgaccaacctgcgctcacgataaatcaactaccattgcaaaatacacagaatttggtgagtgaattaacaagtacaccaacgcagtggttgactaaaaagggactgcaaaagctgcaccaagtgcgcaaacaagcgacacaagagacggacgcctttttaacagcaaccgactttaaacaggctccgttaagagcagcgggttttccgcagcgcgagcaacttttttattggccacaagggctcaattcccaagggctggtgcttgcgcaacaacagaatctagcgttgcaacttgcgattaataatccaagctatcagcacttaacgcttctgtgtaccgatgaacaaacaatgatgatttttgactaaatgtaaaaggactgattaaatgacattggaaatcacacaacgccaaggaattgtcgtctggctctattcattacgacaagtaaagcaattacgccgttacggacttgtgtattacacctcgaaacgaatgaaatatgtttatctatacgtagatatggcagatgccgaaactgttatgcaacggttaaaaaaattacactacgtcaaacgagtgaccccttctgaaagaccagctattgatatggatttcagtaatcgagtaggacgctcagatcaagaaattgccgatgcggcagaattagaggagtaatagagatgcggattattgcaggagaatttgggggtcgcaagttaaaagctgtccctgggatgaaaacacggccaacaacggacaaggttaaagaagcaatgtttagtatgttggggcaattttttgacggtgggcaggcgcttgatttatatgccggtagcggtggtctcgcaattgaagccgtttcacgcggtatggatcatgcttatttagttgatcgccaatatgcagcgattcaaacgattgaagaaaacgttgcggttactaaaatgccagaatgctttacaatctggaagatgccagctgaaaaagcgttggtgaaactagcggatgctggtgttcaattcgatttaattttattagatccaccctacaaggaacaacagatgttgcttcagttacaacaattcgtcgaaatggggttattagcaccagacgcgacgattctttgcgaaaccgatacgacggttgattatccaactgacattctgcattacatactgaaacggcaacagaattatgggattacagaagtagcaatctttaaatttattggttaggaggcagctatatgccgaaaattgcattatttccgggaagttttgacccgtttacaaatgggcatctcgatactgttgaacgggcaagtcacttgtttgaccaagtgattatcgcggtgatgactaacgctactaaacaaccgttatttgacgcaaccactaaggttgaactgattgaagcggcgacgcaacacttggataacgttaaggtaatcgcacaatcgaagacgttgacggcaacctttgctaaagaagtcggtgcgcgatatttgattcgtggtattcggaatgccaatgattttgagtatgaacgtgatattgcggcgttgaatcagacacaagatgctgatttagaaacggtgttattattagcaaagcaagaatttgcttttatctcatcaagtatggtgaaggaaattgcaacgtttggtggccaggttgaacaattggtgccgccggttgtcgcgtctgcgcttgcacaaaaattaggacctgaaagtgattaatatgaataagaataaacgtctattgaagcatctcctatggattgttggcttgatcgtcgtgtttgctttttgctttatcccaacgcattattacgtcgaaggggtcggttcggccgaaaataccaaccagtttgttaaagttaacggtcaacgagatcagcataagggccactttatgttaacaaccgtcgggattcaaggaccagtgacggggttacagctattactgtctaaaacacaaccttttacggagattattagtcgtgatgaactaatgggtgacgatgatactgaagcgtatgatcagattcaaaaatactacatggaaagctcgattaattttgcgattgaggcggcttatcaaaaggcacatcaggaataccacactcaatatctgggtgtctatgtgatgtcaattttagataattcagcttttaaaaaagatctggctattggtgacacaattacggcaattgatcagcatcaatttaagagtgcaaataagttcgtcaagtatgttcaagggcttaaagtgaatcaaaaagtcacgattagctatgaacataatggccagcgtaagactgcgacccgtaaattgattaaattacctaaatcgcgctacgctggtttgggaattacgctgacagatcactcaaaaattgtgacaaaagtgccggttaagattgatgcgggtgaaattggtggtccttctgctggcttgatgtttacgttacagatttataaccaattaacgaaacaaaacttaacgggtggtcgcaagatttccggaacggggacaatggatcctgatgggacagtgggaccaatcggcggaattgataagaaggtactgattgcgagtcaagaaggcgccaaagtctttttcgcacctgatgatcccgtgacaaaagccatactaaaggtagaaccccattatcaaaataattatgcgattgccaaagcagccgctaaaaaaattggtactaagatgaaaatcgttcctgtcaaaaacttggacgatgcattggattatttagccaaacattaaaaaatttgtcggttcgaaagaatcggcaaattttttttgcgttttggggtaattaggaataaggaggtggcgaaaaatgtggcgcgactattggcaacggtatcgtcgattctggtgggtaccttgtttggtgataattttacttggtggtggtgtgttttggcagcatagtcggcaacaacgttttctatcaaccaatcaacaattgatggcgcaatcaactaagcgaaaagtgaaggcaaaacccgtcaaacagaagaaaagcgtctcaaaaggtgggtttgtcgatatcaaaggcgctgtggcacatccagggatttatccgatttgtgttgcaaagacgcgtttatttgaggtgctgaaacaagcgggggatgtgaccgaagcagcggatacgagtcagttgaacttagcgcaaacattgagtgaccaacttattatctatgtgccaactaagggagaagcggtgcaagccgaagaattagtgaaagcggcagacgagccacaggctgcgactgacaatcaagcgggagccagtccgatatcaactgatgctaaaatcaacctaaaccaagcggatgcgacacaattgcaaacgctaaatggcatcggtcctaaaaaagctgaacaaataattgcatatcgggatgagcaagggcagtttaaacaaatcgaagatcttcaaaaagttgggggaattgggccgaaaacgtttgaacaattacggccacaaatttgtgttaattagtttgtgaatggtatttttttgctatactaaaactattaactttaaagggggaattcgtgtgtcagaaaagagaatgccgtggaatcaatattttatgcttcaatcggtcttgttgtcgatgcgtagcacctgtccaagattgtttgtgggtgcgttggtggttcgtaatcggcgaattattgcgggaggctacaacggttcggtggcacatgaaagtcactgtatcgatgttggctgtttattacgggacgggcattgtttacgaacaattcatgccgagatgaacgccttgactcaatgcgctaagtttggtgtgcagacggaaggggccgaaatttatgtcacacattttccatgtcttcagtgtactaaattaattattcaagctgggatcagtaaaatccattatcaaaaggattatcataacgacgaatatgcgtatgaattgattgaaaaatctggtattgaattggaccaagtcgatttaacggcgaatgacgccaacaccctcgttaactttttggagaatgaacaaactgctgagtgattaagaataactgggtttatccagttatttgtttagcaagtttaaatgcgttattactaggacaagcaccacttttttttagctgtcttttgatagtgtgtctactgcgactgtggtgcttacgccaaccagctgtgttaatggtcagtggactggtactgtgtttaggcggttgccgtttttggctggcacggcgcacctacgaacagccggttagaccaaataatcaagtatataagattcaacccgatacgatcaaagtggctggcgatcagattcaattaatggcgcaggggcagaatgatgaccaacgtgttgtttgctactatcgctgccagagttcagcggaaaaacgccgttggcaaacgacgaatcagccgttattattagcgggtgatattgaattagagcgtatccaaggtgctactaaccggaatgagttcgactatgcgcgctttatggggcagcaaaagcattgtttttatcaagcaaatataattgacggaacggtctttagacgcattccaccacaaggttggctagattggttccaccaacggcgccaacaggggctgatttatctccgacaattgccaccagcgttgagttttcatgcagaggcgttgttatgtggtgttcgagagtcagatggcctggcctaccagaatgtgttaggtcaattggggattattcatttattgagtttatccggattgcatgtattctactttgtgacaatcattcgtcgattggcaacgctgtgtcgagtcccgcgtgaatgggtgaatgttagcttgttttgtttgctacccctttatgcgttgtttgtggggggaggcacgagtattacacgcgctatcgggctgatcttactacgattaatctgcgaagtaagtcattttcagcaatcgcgtttagatagttggagttgggtattgctggtcaatcttttatggcagccgtatttattaatcagtatggggggattgctgagctatctgatggcttttggattgatttatcagcggcgccatggtacttttacaacggcattttggctaggcttgttaagtttaccggtgtgcttgcggtttaattatcgttggcatatcttgacgattttgattaatgggattgtcgcgccgattttcttaccagtcatgttgggtttgattatggtagcgatttgcttatggcctgttagtcatatgatagtttggttagaagaaggcctgctaacgacgctgtataaaggattagcttggattgcaacgttcccatatgcgacaattactttcggtaaaatccagctaataccactctttttaattgtgataggcacactatggttgatggcaagtactggtcggcgagcaaagtggggctggggggctgttatcagcctgtatgtcattagttttattggtatccactttaatccggttggccgcgtgattatgtttgatatcgggcaaggcgatagcctgttgattcaacaacccttcaatcgacataacctgttaattgacaccggcggccgactagctttaccgcaagaaaagtggcaacggcggcaaattgtgagtcgggcggaaaaagtaacagttaattacctctacagctgtggcattgatcatttagaggcaatcgcattatcgcatcaggatgctgatcatataggggacttaaatgaaattatgcaacatatccgagttaaacggttgatttgtgctgcgggcttaccgcaaaaccggcagtttcaacggcaagtgcggccgcatcttacaaaagttgcaattgagccttatttggcggaccaacattttatgattggtcaccaacaaatcaatgtgttagcgccagtggtggccggaccaggcgggaatgctgactcactcgttttgcaaacgcaaattggtggtgcgagttggttatttactggtgatttagaaaaagcgggtgaagtggcaatcgttgatcgctacccacaattacgtgttgattacctaaaggtgggtcaccatggcagtcaaacggcgagtgatcccaagtcaattgcgacgtggcaggtaaaaggggcgttgatttctgcgggacgccataatcgttatggtcatccacatgtcgcaacgttgcagactttaaaacgtgcgaacgtcccattttggaatacggctgactgtgggatgctggaatggcgctatggttttggccaagtgccaatgattaaaacaacactaaaggattgtgactaaatgaagacagaacaactaaaaacagcactgaatcgaggaacgtttgcaccggtgtatctcgtattaggacaagagtcagcgctgattgaagaggttagagcgttatttaaagcaacgctttcgacagaagaaatgacgatgaactttgcgagttatgatctcgcccagacggaggtggcgcgggcattagaagatgcggaatcggccccctttttcggtgagcgacgaattgtttttatgcagaatccattcttcttaacaggtgaaaaagttaaaactaaacttgatcatgatttaaaaggattccaagcttatttagaacagccacaaccgacaacggcactcgttatcttcgcgccatacgcgaagttggatgaacgcaagaagattgttaaacaactgaagaagatggcaactgtcattgacgttcaaaagattaatgagcgccaggtccagcagttagtgacagcgcaactgcaaagtgaacaagtcacgattgaaccagcggcaatgacgttattgttaagcaagactaatggtgattacagtcagattatggctgagttacccaaattactgctttacgcgcaacaaagccgggtgattactgaaacggccgttagtgcattagtggcaagtagtattgaagataatgtttttgaattggtgccgttagttttacaaaaaaaggtcggtccggttttagagatgtatcacgatttattgctacaaaaagaagaaccgctgaaaattaacgccatcttgttgggccaatttcgcttgttactccaagtgaaaattctttttgaaaaagggtatagccaaggtaatttggcgagcgtcttaaaaattcacccataccgcatcaaattagcattgcaacaaattcggcacttttctaaggcgacgcttgcccaagcctatctaggtttagagggcattgaagaaaaaataaagactgggcaaggtgaagcaaccttattgtttgaactgtttatgttacaatttgcgacagatgatgttgcttaaagcaaaaaaagcccccacaaaccaaatggttgtgggggcttttttgtggttaaattatttagccatcattttgtttaagcgtgacttgtcacggccagctttgttggcatggattaagccttttgttgaggccatatcgattgcgcgtgtagcagctttcaataggtctgcagcttcttcgttgcctgctgttttagcagctttgaactttttgattgctgaacgcattgtgcttaattgagaagcgttacgttggttagctttttcaattgttttcacacgtttcatagcagatttaatttgtggcatgttgttcacctccgatgggtttcactatctttataaaaaagatttttaatttcaacagtcgttattataccaaaatagtgagagtgattgcaataaaaacttgtaaagtatttcaacttgactgcttaaatagtttgaaactgtgccttgcttttgacgctaatatttagtaaacttgaaaagtgcttattgcacaggcctactactctgtttagcgacgttcacccgacgctttacgttgttctaggctattataccagaagggtggaaattagcatggctatttcacaagaaaaaaagaacgaaatcattaaccaatttgctcgtcacgaaggcgacacaggttcagcagaagtacaaatcgctgtattgactgcagaaatcaactcattaaacgaacatttatctgttcacaagaaagatcaccattcatatgttggtcaaatgaagaagatcggtcaccgtcgtaacttattacgttacctacgtgaaagcgatgttcaacgttaccgtgaattaatcaagagccttggcttacgtcgttaattcattttcaaaaagcgggtccgttatgcggacccgctttttttgtgctcaaaaggcttttagtaatcaaaagctgttagtttgtttaaattgtgataaaatatgagttagactttaaggcggatgagttttaaacgaatgaacgactaaaacaaacaaaatagtttggggaataaattcctcaagtgctagaggtgaaagaatgagtaacattaagattatgccacttggcggtgttcgtgaaaacggtaagaatttgaacattgttgaagtggacgacgaaatttatgtattagattgtgggttgaaatatccagaaactgaattattggggatcgatatcgttattcctgatatgacctatttagaagaaaatgcagaccgtgttgctgggattttcctaacacatggtcatgctgatgcgattggagcgcttccttatttcttaaaggaacatgatgtaccagtctttgggtctgaattaacgattgctttagctaaaattacggttagcagcgaaccaaaattacgtaagttccaaaacttccacgtcatcgatgcgaatacagcaatcgattttgaacgcgcaaccgtttcattcttcaagacaacgcatacaattccaggttcattagggattgtcgttaagacggatgaaggacaagtcgtttatactggggactttaagtttgatcaatcagcaatgccaatgtatcaaacggattatgcacgcttagctgaaattggcaaacaaggtgttttagcactcttgagtgattctgctaatgcggaatcaccatttgcaacggctaacgaacgcgatattgctgaatccatcttagaaacgttcaagtatcaaacgggtcggatcattgtggcttcagtggcttcaaatattatgcggattcaacaagtcattgatgcggcttataaaacaggccgtaaagtggttttaacgggtcgtgatttagaaaaaatcgtccggacagcaatgaaattatcgatgattattttgccagatgacgatatcttggtccaacctaaagatttaagcacacttgcaccagaacaaacagtgatcttagaaacaggtcggatgggcgaaccaatcaaggcgcttcaaaagatggcaactagtcatcatcgtttaattcacatcgaagaaggcgacttggtttatttaacgacatctccttcacacgcgatggaaacgattttagcgaagaccaaagatatgatttatcgtgcgggtggcgaagttaaggcggttggcgatgatttacatgcttcaggccatgccaataagaatgacttgcaattaatgttgaatttaatgcaaccaaaattcttaatgcctgttcaaggcgaataccggcaactagcagcacacgctgatattgctcatgaaacaggaatggattacaaagatattttcatcgttggtaaaggcgatattgtcgcttacgaaaaagggaagatgcatgttggcggacaagttgacgcaactgacgtcatgattgacggtagcggtgtcggcgatatcgggaatatcgttttacgcgatcggaaattattatcagaagacgggatttttatcgctgttgttacgattgaccgcaagaataagaagattatcgcggaaccgaaagtcaccgcacgtggttttgtttacgtgaagactagcaaagatttaatggctgagagtgccgaaattatcaaaaatgcggtgcaaaataatctggacaacaaagaatttgactggagtcatttgaaacaagatgtccgggaaaacttaagtcattacttgtatgaacaaacgaaacgtcggccagtgattctaccagtgattatggaaattaatcaaaatcatcgtcgtcaaagaaaagataataaaccaaaggctgaaaaagccgctgaataacatttagaaacaatagcgtctggatcaggtcagttgattctaggcgctattgttttattaattgtcaaaaggaagtgattgaatgggtgacattacgcaatttccagatcagtatgatcggctgatacggatggggaaagtagcgttaaatcaacaaaattggcagcaagcatgcgaccattttgaagctgcgtatcaactagaacagacgttgtcggcgaatttattgtgggccagtgcgctgattgaagctggtgatccgcaaacagcattgacaatcgtcgaagaacaacaagcggactacttacaacaaacagatttagtgcggttttatcttgcattattactgaataaccaccgttttattacggcaaatcaagtgtgggaggcattacgccatgcgacgattgccccgcaagtcattaagacgcttagaatgatgattacggctgcggaattagaataccaagcgaatcaccaagcagcgattcaaaagcaagcagagggcctctataacctcactgcgcacccattagctgaacagctagcaatgttgacgcaggctgaacaattaccacgtaatgtttatgtcaccagtattgcgcccattttaacgaatccttacagtcatgctttcgtgaagacgactgtcattgaaacgctcgtccagctgaatattgaacaattagtcacgatgcaatggtttgaacagacaaaaacttttgtacctgccgatatccaattgatggaggagagcccgacgtttaatgcggtgttagcggcgttaaatgagcagttagccactgaagatccgactttgttagcacaagtgatggcggatgttgagatgggatttgcatatttatatccttttgaagctgaaatcatgtataatcctacggagtgggcgcaagcatggctcaaacagttactgggtccggattataccgcgtcagtggttatttcagaaaagatacaggactgggtgaaaaagttgcaagaaatgacagggaaacttgatttttagagtagaaaacacctaaatatcgtttcaaaactgactttttttgagcattaagtgtttacaaacgcgctcatagcagatataatcatttttgaattcttcaagtgtaaaaaaacactttgattttagcgcttgaagtattataatattatgtaaaggattatcagtttagtaaatctaaacactgattttttcttgcgaaaatacaggaggttcgttttaatggcagaaaaagcacattacgaaagaacaaaaccccacgttaacatcggtactatcggacatgttgatcatgggaaaacaactttaacagcagcaatcacaaagatgttggcagacaaaggcttggctgaagctcaagactatgcaaacatcgatgctgctccagaagaaagagaacgtggtatcactatcaatacagcccacgttgaatacgaaacagaaaaccgtcattatgcacatattgacgccccaggacatgctgattacgttaagaacatgatcactggtgctgctcaaatggacggtgctatcttagttgttgccgcaactgatggccctatgccacaaacacgtgaacatatcttacttgctcaccaagttggtgttgactacatcatcgtcttcttaaacaagactgatttagttgatgatgacgaattaacggacttagttgaaatggaagttcgtgaattattatcagaatacgatttccctggtgacgatattccagttatccgcggttcagcacttggtgcattgaacggcaatgctgacgacgttaaagctgttgaagaattaatggctactgttgacgaatatatcccaactccagaacgtgacacagacaaaccattcttgatgcctgttgaagacgtatttacgattactggtcgtggtactgttgcttcaggtcgtatcgatcgtggccaagttactgtcggtgacgaagttgaaatcgttggtttgaaagacgaagttgctaagacaactgttactggtttggaaatgttccgtaagacattggatcaaggtcaagccggcgataacgttggtgctttattacgtggtatcgaccgcgatagcattgaacgtggccaagttttagctaaaccaggttcaatccaaactcacaagaacttcaagggtgaagtttatatcttgagcaaggatgaaggtggtcgtcatacaccattcttctcaaactatcgtcctcaattcttcttccatacaactgatgttacaggtgttatcgaattaccagaaggtgtagaaatggttatgcctggtgataacgtaacatttactgttgaattaatctcaccagttgctattgaaaaaggtcttaagttcactgttcgtgaaggtggccgtactgttggtgccggtgtcgttagtgaaattatcgactaatattcaacctagttgaatcgaaaaactcgtagtgtaaaaactgcgagtttttttgtgcattaaattcgataaaagttggcctgaaacgactaaaatatcggattttatcgctttttagaccaataaatatttacaatttaggttaaatagtttatgctgattaagtatgcaattgatagattgtgaatataactgtcggagggaaattatgtcagcaaaatgggaaaaaaagggcaccaatgatggtgaactaacctttgaaattgatttaaataaaattagtgaaggtttggacgttgcgttcaaacgtgtacgtaaaaatatcaacacaccaggtttccgtaaaggtaaaatgcctcgccaaatctttaacaagatgtatggtgaagaagccctttatgaagatgctttaaatgcaatcttaccagaagcttatgatgctgctgttaaagaagctgctattcaaccagttgatcaaccacaaattaatgttgaaaaaatggaaaaaggcgaaccttgggtgattactgctcaagtcaccgttaaaccagaagtaactttaggcgactataaaggcttagaagtaccaaaacaaagccgtcgcattacaatcaaagacgttgatcaagaaattgaaaaccgtcgcgaacgtcaagctgaattggtattaaaagaagacgcagctgctgaaaagggcgatactgttgtcatcgattatgctggttctgtagatggcgtaccttttgatggtggtcaagcagacaactattcattagaacttggctcaaattcattcattccaggtttcgaagatcaattagtcggtcacaaagcagacgacaacgttgatgttaaagtaaccttccctgaagattaccaagcagaagaattagctggtaaagaagccatcttcaaggtaacaatccatgaagtgaaagctaaggaattacctgaattagatgacgaatttgctaaagatatcgacgaaagtgttgatacattagacgaattaaaagaaaaaattcgtgaagaattaaaacaacaaaaaaatgatgctgcagatgctgctatccaagatacagccgttgctaaagcaactgaaaatgcaacaatcgctgaattacctcaagcaatgattgacgaagaaatcaacagtcaattacaacaatacttaggtaacatgcaacaacaaggtatcaacccggaaatgtactatcaaatcactggtacaactgaagatgatttgaagaaacaattcgctggtgatgctgacaaacgcgttaagacaagtcttgtacttgaagccgttgtggaagctgaaaacatcgaagcaacagacgaagaagttgctgcagaacttaagagtttagctgaacaatacaatatggaagaagctgctgttcgtagcgtcttatcagatgacatgttaaaacatgatatcggtgttaagaaagcaatcgaaatcattgctgattcagctgtagaagtgaaagacgctaaataaggtcgtctgatcaatccaagctttaaatgatgctaaaaagcgggttcaaggtgtttactttggacccgcttttgtgtcattgacggtgtgcgagtaactttactttattctagaccatagttatgctatagtctgaattacgttgtaggggtgtattttaacgactcacagcggtaagcgtatatcgagaaaggggagaatcccagtatgctagatgatacagaaacaactaacggacccgtaacgtgttcgttttgtgggaagtcgcaagatcaagtgaaaaagatcgtggctggccctggtgtttatatctgtaacgaatgtatcgacctttgcaaagagattattgatgaagagtttaaagatgaggccttcagtgatttactagaagtgccaaagccaaaagaaattttagccattttaaatgattatgtgattggtcaaacagaagcgaaaaaagctttatctgtcgcagtctacaaccattacaagcgggtcaaccaaatgtcagtggccgaagaaggcgatactgaattacaaaagagtaatattgcgttaattggaccaactggttccgggaagacattccttgcgcaaaccttagcgcggattttaaatgtgccatttgcgattgcagatgccacgactttaactgaagcgggttacgtgggtgaagatgttgaaaatatcctcttgaagctgttgcaaaatgcagacttcgatgttgatcgtgctgaacgcgggatcatttacatcgatgaaatcgacaagattgccaaaaagagtgaaaacgtctcgatcacgcgtgatgtttctggtgaaggggtccaacaagccctcttgaagattcttgaaggaacgattgctagtgtgccacctcaaggcggtcgcaagcatccacaacaagagttaatccaaattgatacgaccaatattttattcatcattggtggcgcctttgacggcatcgaaacgattgttaaaaaccgcttaggtgaaaagacaattggttttggaagcaagaatggtcaaactaccaatgaagatcaaagcttaatgcaacaaattgtaacggaagatttaatgaaatttgggattattcctgaattcattggtcggattccgattaccgctgcattggaaaaactgactgaagatgatttggtgcatattttaactgaacctaagaacgcgctcgttaagcaatacagcaagttgatggccttggataatgttgaattagaatttacaccagaagcactccatgcgattgcacatctagcgattgaacgaaacacgggggcccgtggtttacgttcgatcattgaagaagtcatgatggatatgatgtttgatattccaagtcgtgaagacgtggctaaagttgttgtaacgaaagaagcggtggatggcacagccaacccacaactctttttagctgacggacaagaagcgtcataaaaattaaaagactgccgggacaaattagattttgtcgcggcagtttttttgcattaagggacttttgaaacggtacaatgacgcgatttaacggggttaagaagatatgttaaccatgaaactagagagatgtcaacggcgcaataattatttatttatgctaaactaacattcgaaggaaataatcggaggttattatggaagtacatgatgttgaaatggtgatgagtgcggtagctgcttcgcagtacccaactgatcaattacctgaaattgcgttatctggtcgctcgaatgtcggtaagtcttcattgattaataaattaatcaatcgtaagagttatgcccggacatctagcaagccaggtaagacacagactttaaacttttaccgcgttgaaaacgaactttactttgtcgatgtccctggttatgggtatgccaaagtttcaaagaagcaacgtgagaagtttgggcaaattatcgaggcttatttaaccagccgctcaaatctaaaggggcttatttcattaattgacggccgtcacgaaccaaccgatgatgatatcgcgatgtacgtttttgcgaagtattatgatatccctgttttagtggttgctactaagatggataagatctcaacgggaaaatggaatcgtcaagaaaaaatcatcaaagaagcgcttgattttaatccagtcgatcaatttgtctgctttagcgcactgactggtgctggtaaagagacagtttgggaatggattgaaaagcaatgtgcaatagggggacaagcataatggaatttaatgactatcaaaagttagccaaccgaacgttatatggtaacgaacaagtgttaactaacttagctttgggcttagcaagtgaaagtggtgaagtggttgatatcgttaaaaaatatgcgttccaaggccacgaactagatgaaaaaataatgtctaagaaaatcggcgatgtgctttggtatttatcacaaattgcggaatggaataacctcgactttgataaagtcgcgcgcgaaaacattgaacaattaaaacaacgctacccagaaagacacgcagaataaagcgtacaatcgcgttaaccgaaaggcgattgcaaatgacgcacgtttaaaccagcaaaaaggcggtaagacaaaaatgaatttgtcttaccgccttttttgctgtctttgtttaatgcttttctttttgttctgcatctaccttttttaatttatcagctgtttcttcaacttgtgcttcaactttttggcgttcttctggtagtgatgcgaatttatcgaataaaccggttaaatcggtcttgttagtgacttttaagcccatcgtaatccctcttttctaatttgcatctatcataccagataataacggtttcgccaatgattcactttttataaataaatattgcataattatttaattggttgtatgatagtactaatcagaggaggagataatatgacgattaaaaaattactcacttttgttgggttaccattcatggtaatgttaacgtttttcatgattcagcagcagcccgttttggcagctggacagacggttagccaagtgcaagctaaaaaaacgttgtttttgggaaccagccccgattatgcaccttatgaatttttagtgaataaaaacggtaagaacaagattgtcggtatggatattcaagtcgcacagaagctagctgatgatttaggcgttaagttagtggtgaagtcgatggactttgatgcgttattggttggtttggaaaccggtaaagtcgatatggttatttcggcgatgtcaccaacggatgaacgaagcaagagtgttgatttttctgatgtttattatctcggtggtcaatcaatcttagtcaataaagctgatgcgaagatttaccactccaaaaatagttttaacgggaaaaaagtgggggtccaaacggggagtctccaacaaacactcgctaaaaagcaaattaaagatgcgcagattacgggcttggccaaagtcccagatctcgtccttgcattaaagagtcataaaatcgacgggattgtggcggaagaaccagtcgcaaccgcctatgcaagtaatgatccagaactcgttcaaattaatgggaaatttgatttaggcgcagacatgcaaggatcagcgattgcctttccaaaggattcgccaaccttagtcgctgctgctaataagagtatcgggcaaattaaaaagcaaaaattaattccgcaatacttaaagaacgcgggccaactcatgaaggtcaatacgcacaacactagcatgtggcactattggtcatacttcgctaaagggattggctacacattattcattacgattgtttcaattgcaattgggattttaattggggtcctcctagcctttgggcgtttggccaagaataagttggtgcgtgcgctggcagtcatgtatatcgaatttgttcggggcacaccgttgatgattcaaatcatgtttgtctacttcgggattggcttatgggtcaacattccagcacttttggcaggggtaattgccgtttccttaaatagtgcggcgtatgttgctgaaattatccgttcagggatcaatgcgatcgatgctgggcaaactgaagcttcaagaagtttaggcttgtcacaacgcgatacaatgcgttacattgttttaccacaagccctgaagaatatctggcctgctttagggaacgaattcatttctttaatcaaggaaagttcaatcgtttccattatcggggtcactgatttaatttatcaactcaaagtggttcaatcagcaacttataaaggcgttgcaccgatttttgttgcgatggtgatctactttatcatgacctttagtctctcgaaacttttgaactatgtggaaaggaagatgcaacatgcttaagattaatcaattggttaaaaaatatggggacaacctcgtgttaaatggtgttagtggtgaagtccaagctggtcaagtgattgttgtcatcggcccttccggtgggggtaagagtacgttattgcggtgcttgaaccgtttagaggacccaacgagtggccaaattctgtttgaaggcaccgatttgatgacgttatctgaaaaacagcttgatcagattcggacaaagatggggatggttttccaaaactttaaccttttccccaatttaactgtcctcgataacttaacgttggcgccacaaaaagtgaagaaagaatcagcggccgaaacaacggctaaagcaaaagcgttgcttgaacgcgttggtttagcggataaggcggatgcttatagtgatcaactctctggtgggcagaaacaacggattgcaattgcgcgggcattagcgatgtcacccgacgtattgttatttgatgaaccgacatctgcgctcgatccagaaatggtcggcgaagtcctcaaggtcatgcaagacttagcacaagaagggatgacaatggttgttgtcacccacgaaatggggtttgcgcgcgaagtggcggatgaagtctggttcatggcagatagtcaaattgtcgaaaaaggggaccccgaagccatttttgaccatccgcaagaagaacggacgcaacaatttttagccaaggtcctagcacaatagttgcaatttagccaaaaacacgtaaaatagaaagacgaacacttgttttgaattaaaggagtggtgtttttggcaagcgaacacattgaacataaattagcactcttacctgcattacctggttgttatatcatgaaggatatcaatgccaagattatctatgtgggtaaagcaaaaaatcttaaaaaccgcgtgcgctcgtatttcaagagtagtcacgaaggaaaaacggccaaattggtctctgaaattgtcgattttgaaacaatcatcacatcgacaaataaagaggcctttttgttggaaattacgttaatccagaaacaccaaccttactttaatattaaacttaagcggggcacaggctacccctacattaaaattacgaatgaacgcgatccgcgcctactgatcacgggggatgtcaaaaaagatggcggcttttattttggcccttatccggacgtgtatgccgcccaagaaacattgcgattcttacaacgggtttatcctttacgacgctgtcagggacatcaagggcggccctgtttgtattatcatatgggtcaatgtttgggcgcgtgtttcaaagaagtgcctgagagtgtctatgcggcccaaatcaaggagattaaacgtttcttgaatgggcaagttgatccggttaaaaaagaactgacggccaagatgactacggctgctgaagagatgcagtttgaacgcgccgcagaattgcgcgatcagctccactacattgaagccaccgttgaaaagcagaaaattatttctaacgataataccccgcgcgatttatttgccttttatttggataagggctggttatcgattcaaatcttcttcatccgccaagcacggttgattcggcgtgaaaagcggctcttcccgtgtgtcagcacacctgaagaagaattggcaacctttattttacaatggtacaaccgcaagaataatgtgttaccccgcgaaattctggttccagaaggggtcgaaaagaaagtcctgaccgaaattttgaatgtgccgattcgcacgccgcaacgtggtgagaaaaaagcgttgatggaaatggcacagaaaaatagtcggcttgtgttggaagagaagttccgtttattggaactcgacaaccgcaagaccgttggggcgcaagatgagattatggacgcgcttggcttaccacatggacacgtgattgaagcgtttgaccattcacatattcaagggactgatcctgtctcagtgatggtcacgtttgttgatggtcgtgccgagaagaaactctatcgcaagtataagttaacgcaaacgacagatcgtgcaggcgccaacgaagatgccaatacgcgggaagtcattttccggcggtattcgcgattgctcaaagaggataaaccactgcctgatttgattttaatggatggtggaattgtggagctcaatgcggctaaagacgtcttagagaacgaattagggctatcaattcccgttgcagggatggtcaaggataatcatcacaaaaccgcctcgttgttatatggggaagttgatcaaaccattcagttggatccaaagagccaaggcttctacttgttaacgcgaattcaagacgaagtgcatcgctttgccatcagtttccaccgccaattacgcgggaagaattcgttgagttctaaactcgatgacatcaagggggttggtcctaagacgcggacgaaactcttgaagaattttggttcgatgaaacatatcaaagaagcttcagtggcggaactcgaagcactcgggattcctaagactgtggcgcaaacgattaaattatcactttaaaagcctaggtcagacaactattatttgtctgacctaggtttttttagggtgctaatggttggttaacggttttttttacccacttagtagccaattggatgtaagctgattcctgagacaacttttaagagagggtataatgaataaatcatctctcaaaaggaaggaatttttacatgccaactcgttacgacaaagaattcaaacaaaacattatcaacctatataagcaaggcgaatcagctgcccaactggccagagaatatggcattggctattcaacagttcataagtggatccagggccaggccaaaactcaatccggtaaatcgccagacgaaatcaaagcgatggaaaagcgactggcttcgctgtctgaggagaacgaaatcctaaaaaaagccctgggtttccttgcgcagaagtaaccaatatctttgattacattcaccaagaaagccatcaccaccaggtaaccaagatgtgccgaatcctcggtgtttccagagctcagtattatcgttatcgatcccccaaaccttcaaaacgccgggccgaagatgcgggcttgaaacaacggattctgcggatctttgcggaatttaagcagcgatacggtgttatgaagatccaccatgaattgaatctggaacttcaaccactgcagcttcggtgcagtccacgacggatttcccggctcatgaaggaactggatagccactccgttaccgtcaataagtggaaagcggcttcggcttccaaaaccaaggttgaacagcgtcccaacttgcttaagcaggatttctcgaccactggtttaaatcaaaaatggaccgctgatatgacctatattcaaacgaagcgtaatggctggtgttacttatcaaccatcatggacctgcactcacgacggattatcggctattcgttctccaaaaagatggctactgatttagtcttaaagacccttgaaagcgcggttaaaaatcgaaccattactggggacctgattatctatacggatttaggatcacagtataccagcgatgattacaatcaacgtttaactgagctacatatccgccactcatacagccgtaagggttgtccgtatgataatgcgccaatggaatcctttcacgcttccctcaaaaaggaatgtgtttatccagtgccggtctttgaagattatgaaactgccgctgccgtcctttttgaatatgtgcatgctttctacaataggaagagaattcatagttcactgggctaccagacccccttacaagttgaaattgcaacacttacgagccaaatggccgcctgatttaatgctttccagggttcaaataagttattaatcgggcaaattacaagtttaatccgaacaagcccggaatctttcaatggcagtctgttgatgatgtatttttaatggtcgttgattaattagttcaagtgctgctaggatctcatcagtcgttacttggctaaaattggtctttttcgggaagaaccagcgtaaccgtctattaaaatattcattggaacctcgctcccatggtgaatatggatggcaaaaataaactttgatctgataatcctgttctaaggcctgataattggcaaactctttaccatgatcaacagtaatggattttacttggggaccgaaggcccccataaacttgccaaaggcggtgtttagagccttagccgttctattaggggctttgatggcccatagaagtcgggtcttacgttctacgaatgtaaccagacatgatcgtgactcacttcgactagaaagcaccgtatctacttcccaatgaccaaaagctaaccgttgattaacagttgttggccgttgttcgatggaagtcccacttgtaaatttcccacgattttcgctcactcggtgctggcggacattccgattgggtagatcagtcaatttgaaggggagccagccacgattaagccaattataaattgacgcagtgctcaagttataagcggccgcaatggtttctggtgaccaggttaatcgtaagtgattggtaattaaagtcgctaatgctgccgtcagcatcgaacgacgaccgcaatttcgccttttgcgatctgcatcttgctgagctaattctggatcataaggtttaactcggtccaactcatagctaatcgtagctttggcgacgcctaaggcgtcagccattacttggtaagatttattcccctcattgaccagttgtgctagtgcgccacgttgaaaacgtgataaagtagatgtacccaaagtaatcactccctatattggttggaattagctactaccattgtaagtgattgctttgggctttttaatttctgttcggattaattatagaatttgccatcgcgattaatgatttatttgagctgtggaaggtaaacgcggttctgaatgtctcttaaaatctgtctcaaatattgacttcaatccaataaaatcagcgacaccgacgagtttcaaaggtcgatgacagtgggctcgattagcttcgtacttagcttgtgctgtttctggtgagtatacagcgtaatattggcgttgaccattcactttttttacttggtcgatctcgccgcggcacaattcattattgattgtttgatgacaaacattaagcgctctggcaattgcacgattggaatagccttggctgtgcagcgtagcaattctgcctcgtttaaacgaagttaggtgctgacctttttttctgactgtggtattctgttcttgcatcaagacaataacctctttcattgtttgtgtaggaacatcaatgataacagagatttgtcttggtgttttttattttatcaattagctaaaagtatttggctaacttgattataaaacgcgcgaataaaaatctatcaaaatgctgtcttgaaaaagtatcaggaccggttatatttgaaagacgtcaatgggcaacatcgaaaattgaaaggcgtcaaattacaggaaatattgatgatgtattgctgattgttgatagggacattgtggaagtatatacaatggatgggcttcaagtaatgactggcagagtgttctaaagtaagtaaatggtttcttagcacaggaaaaatatagagtattgtaaattaatagttaatcaattgttctttaatctcccaccctaaatatggtacgcttatgttagtttgaacgaggacgtgagtgggatgcagaaaaaagcactttttaaaaatggtctcgggattatcattggcgccttgatttatgcggtggcgattaatgatttcctgattcctcatcatattggtgaaggtggcgtgactggcttaacggcgattggctactatgcgttagcaattccgccagctgctacgaatttggttctaaacggtttattagtgattgtcggctttaagtatttagagaagcaaaccatctggtattcggtctgggcggtactctggatttctatcttcttgcggctcccgcattttatcggctaccatacgacacagacgatcattccgacgataattggtggcgtcttgatggggattgcaatggcgattattattcattgccaagggacgattgctggtagtacgatcttagcgaagattgccaatcgctatttagggatccaaaacggctctgcgatgcttttttttgatttaattgttgccattccatccggcttcattatcggcttccaaaatatgctcttaacgattattgaattgtatttatcagcagtcgttttgaataaattattggctaaatttggggcaaaacgcgcggtgacgattatttcggatcaatatgcaacgattgcccaaacattgtcgacgcaattccaccaaggcatcacgatcattaaagcgcaagggtactatagtcaaaatgaccggccgatgctgtatgtcatttgtacggccaaacaactcgcgacgctcgtaccggtggtctcaacgattgacaagcaggcgctagtagtagtcgaagaagtccgcagtgtccaagcagaacaattgaaacagcttctttagaaacaccgtggttgaccatggtgttttttactcgctaaaattagttttatatagtaagatataattaatgctgatataaaaacaatttaggagtggacgggatgaaaaccaaaaagggtggttatttaactttgaagattcgcttattaaatacccgactttttaatcgttatttaacggctgatccacgcgcgtgctataacgctgaacaggggaaaattttgtcagcattgtgggatcatcatccgcaaactgctacggaattggcacaagtgactggcttagccaatagtagtttatcgttgatgttacggcgcttagaagaacagggattattgatgagtgagcaatcgccacttgataagcgcaagcgggtctttgacttaactgaacaaggcgctaatcagcaacaggtcggtgatgacgttagtcaacgattgagcgccgttttttacaagggcttttcggatgctgaagtggcagctgttgacggctatttagaacgaattttagcgaatttagaagcagaggcggccgtttttaaccgtcaagcaaaaggggagcgaaccaataatgacaattgaacaaccaacgtagattgaagtgcgtggcgggaacgtcaataacttgaaaaatattaacgtcgatattccgttgaaccaatttgtggcgatttcgggaccgtctggttcaggaaaaagttcgcttgcgatggggattttatatgcagaaggctcacggcgttatttagaggcgttgtcgacgtacacgcggcgccgaatcacgcagaataaacgctcacaagtccaagaagtgcggcatattccatcagcgattgcacttcggcaacgaccaagtatgccatcagaacggccaactgttggttcgatgagtgagatttttaatgtcgtcagattgattttttcacggttagggacgacacgttgtccaaatgggcacgtgattcaaccaagtctaaaaattgcccaagcgatggacttagctggcgataaaatggggattattacgtgccctacttgccaagtgcagtttatggctaaatcggccgaagactttgcctttaattcagctggcgcctgcccagaatgtcatgggacggggcagattcaaacgttagatgatcgcaaaatcatcgcggatgaaaatctcagtattgaagacggagcgattgcctcatggcgattgccgggccggaatttcatgccaaccgttgctgcccacattggggtccgaattgatgtcccttacaaggacttgacggccaaggaaaaagaaattgtcctgcatggtaaacgggcgaagtatgcggttgatttccatacctcaacgggccgtgtgtttagtacggagaataccctctatgaaaatgcttatgacgctgtttatgaatcgctaaaatcggttaaaagtgatcgggcaatggctaaagtcaattcatttttccatttttcaacctgtccaacgtgtcatgggacccggttaaatccggcattactgacccaaacagttggcggacaaaacattgcagcagtttctaatttgacgttaggcgcattagaagattgggtgcgtgctactaaggccgacttaccggatgaaatgcagcaaatggcgacaattttatttaagaacctattaggaacactgcaaccgttactagaattagggttggattatttaacgttgtcgcgcaatgggaatacattgtcgactggcgagctccaacggattcaattggcgcggacgttgcgaacagcgacaactggtgtgttgtacgttttagatgaaccatcggttgggctgcatcctgacaacgtcgaagggctaattcatattttccggcagctagtggcacaaggcaattcgttagtggtagctgatcatgaagtgaatatcatcagtcaagcggattgggtgattgaaattgggccagaagctgggcgcaaaggggaacaagtgattgcccaagggaaacccgcggatttgatccagaatccacagtccctgattggccactatatcgctggtcgagcgaacatcttatatcctaaagtcactgccgcaacgactggtgagcagacaacgatgacggttggccaatattttaatctgcatgatgtcacaatcaaagtgccagataaccaaattacggcggtttctgggttttccggcgccgggaagacgagtttgattctagatagtttagtgccagcaattgaagcgcaccaccaacatgagcaattacccgagcagggcacccagttgacgaccgatttaacgtcagtcgtcagcattgatgccaagccggttggtaagaatatacgctcaacactcgcgacttatacgagtatcatgaacaatctgcggaaattatttgctggtttaccagaatcacaagcgcatcattatgggatcgcgcacttttcgtataacaataaagaaggcgcctgtccgaactgtggtgggttaggcagcattattttggatattcaatatttgccagacatggaagaaacctgtccagaatgtcatggtaaccgctacaaaccagagattgaagccatcaagtggcaaggctatagcatcgttgatctattggctttatcggtggaagaagcaatcccggtctttgcagatgtgccagcaattcaaaaggaacttaagattctcaaagaaattggcttagcttatttacaccttggtgaaagtacaccgagtctttcgggtggcgaagcacagcgcttaaaactcgcaacgcatttgaataaaaaacgggcgggcactttattcgtcttcgatgaaccttctgttgggttgcatccgcgcgatgttgaaaccttagtaggcgtcatcaaccagctaaaatccaagggtgccaccattatgatgattacccacgaccttgatttgatgaccaatgccgattacctgatcgacttggggcctaaaggtggtagtcaagggggccaagtgatggcgatgggtgcaccatttgagcttgttgcctcagacgcggagagtttaaccttaagttatttacgggcacattttaagaagtttcaattaacaacaactaaagtggggtgaaaaaatgggacaaacctctttgtttgatcaagagatggcgatgaatgcgccgcttgctaatcgggtccgaccgtctgatttagacagttttgtcggtcagaagcatttagtcggaccaggcaagtttttacgcgaaatgattgataaagatcaagtgacttcgatgattttctggggaccacccggcgttgggaagaccacgttggcggagattatcgcgcgcaagacggcttcgaaatttatcacgtttagtgccgcgatgaatgggatcaaagagattcggaagattatgaatgaagccgaagaaaaccgccaactgggtgagcggacgattgtctttattgatgaaattcaccggtttaacaaggcgcaacaggatgcttttttaccgtatgttgaaaaaggcagcattatcctaattggtgcgacaaccgaaaatccgtcgtttgaaatcaattcagcgttgctatcacgttcacgcgtttttgtgctaaagcaattgacggaagcggacattattgagttgctacaacgggttttaaaggcgccccaagccttcccggatttaacggttcatatcagtgatgaattattgaagcaagtcgccatcttttcgaatggggatgcacggacggcgctgaatattttagaaatgttagttattaatagtgatgtgcaagaccatcaagtgaccgtcgatggcgatctattgggggaactgctaaataaaaaaaccgcctattatgataaagacggtgaggaacactataatattatttcggctttgcataagtcgatgcgcaatagtgatgtcgactcagcgatttattggttggggcggatgattgacggcggcgaagacccgatttatattgctcggcggctcgttcgttttgcgagtgaggacattggtctggccgataacaatgcattgaatttagcaatgaacgtctttcaagcttgtcaggcgattggcttaccggaatgcgacgtgcatttaacacagtgcgtgatttatctatcgcttgcgccgaaatcaaacgccacttataaggcgcggacagcggtgcaaaaggatattaaaaagacgattgatgaacccgtgccattgcacttgcgtaatgcggcgacgaaattgatgaaggaagtcggttacggcaaaggatatcaactcgcacatttctacgatgatagattgaccacgatgccaactagaccagagagtatcgccgaccatatttattaccggccgaccgaacaaggcaatgaaacgcggatgaaacaacgtttgaattacattaatgaatggaaacaaaagcacaatactgattttcaagataaataaaaagtcgcagtcatttgactacgactttttaaattaagcttcttttgccactggacgccagaggcctaagattagggcactgacaaatgttccgattaacacggcaagcacaaagagtaggccgtggttggcaagtggtgccacgaagatcccaccatgtggtgcagggacagtgatttgccataattgggttaaaccaccaccgattgctgaaccgataacacttgaaacaatcacgtgtaacggatctgatgcagcaaatggaatggcaccttcagtaatgaatgaaatccctaatacatagtttgcgaaggcttgtttccgttcactaccggtaaatttgtttttgaaaatagtagcagcaaccgcgattgccaatggtgggaccatcccaccagccatgacagcggccatcaatgaaccatctttggtggttgtgaagacaccgattgcgaaggtataagcagccttgttgaaaggaccgcccatatcaacggccatcatgccacctaaaatcgcaccaagtagtaatgcgttaccagcccctaagtgtgttaagaaggtactcaaccagaggttaatttgagcaaagactgggttgatcatgaagtacataataaagccaacaatcaatagtcctaatacagggaatattaagattggttttaaaccatcaagggtttgtggcaagttcttgaagactttcttcaaaccaacgatcacccaaccagcgatgaacccagcagctaaaccgccaaggaatccggctggactctttgaagcaaggacactggctgttgcttggctagccatgtagcccccgacaaatccgggcattaaggcaggccgatcaccgattgaaatcgcgatgtaagcagcaaggaccggaattaagaagttaaaggcattattgcctaatgagttcaagaaaataaaagtggttgaatgtgcgccaacggtttgttccaaaaggaatgagatggccatcaagatcccaccaccgacaacgaatggtaacatgtttgaaacaccattcattaaatcttggtagatgcgactccaaagggttttcttgtcagctgaagcttcttcgcttgattggctttcagttgcgtgatagattgagccttcttcatccaatgttttttgaatcaattcagctggtttcttgatgccgtcgatcacgggacggttcaagagatgtttaccatcaaaacgaggcatatcgactttcttgtcggcagcgatgataacccctgttgcgcggttaatatcgtcagcggttaattggtgtttaacgccttcagaaccgtttgtttcaactttaatgtcgatgcccattttagcagctgtttctttcaaggcagcttcggccatgtaagtgtgggcaatcccagttgggcaggctgtgacagcaacgatgaatggtttttgatcatcagctggcgttgcggctgcggcttgtgctttagcggcttcttcagcttcttccttcgcatcttctgcgtctttagcagcttgagccttagcaaagagcgtttgcacgtcttctggtgtttgggcttgtttcaaatcagcgactaattgtgggttgattaaaagggatgaaagaccagccaaggcttgtaaatgcgtatcgttagcgccttctggagcggcaatcatgaagaacaagtaaacgggttggccgtctagtgcgtcatattcaacaccgttttgacttttagcgaatagcacagttgcgcgttgaacggcactgtcttttgcatggggcattgcaatcccttcgccaattccagttgatgattgagcttcacgagccaaaatatctttacgatagagggcgtcatctgtgataacaccgatgtctttatagcgggcaaccatttcatcaacagcggcttctttagtcgttgcttgtaaatccatgatcatcgcatcttttaagagtaaatcttggatgttcataataaatctcctttgtatttaaaattaatcaacttgtgtgatttcaatttgaggtaagagttcgttaatcttagcgctagtggctaaatcttcagaaaaggcggtggcactaccacaagcaagacttgttttaaaagcggcgagtgcatcgtgatgttgtgcgaatgtgccgacaaaaccggcgatcattgaatcaccagccccaacggaattaatcactgtccctttaggtgtactaccgaggtaagcgtggtctggtgtgattaaaagggcgccgtcaccggccattgagaccaagacatgttgggcaccttggtctaataatttgcgaccagcggcgatgatttcactttggttggcaaagtgtgtgtcgaacagttcggccaattcgtgatggttgggtttgatgaccaatggtttttcagccaatgtgtctaacaaagcttgaccggttgtatcaattacaaattcagcgttgtgcgcttgaatcaatgggattaagtctttgtagaaactagccggtaaattaggtggcaaactcccagacatgaagacaatatcgccggcttccagcttagtcagttgttgtttcaagttggcaacggcttctgctgaaatgtgtgggccttgaccgttaatttcagtttcttcagtattgtcttttaacttcacgttaatccgggtgtcttcttcgacttcagtgaatcgacagtcgatcgaagcgttgttgagtttgctttgaatgaattgaccagtgaagccaccgacaaagccgagggcaacgcttggtaatgctaattcggcaaggatgcgtgaaacgttaatccctttaccaccggggagcttaacgtcagattggacgcggttcacgttaccggtatttagtttttcaagttgaatgacgtaatcgattgatggattcgccgtaatcgtataaatcaagataaaacctcctggatttctgtgtgtgaatgatagtgtttgtaaacagatggtgacaattgatcagtaatcaattggacttgtgccaatggggcaaacttactgaacgaaacagcgtcgaattttgtgtgatccgccaaaaccatcgtttggttcgcttgttgaatcgcaaagcgctttagagtggcttcttctggatcaggggtggttagcccagcttcaacatcgataccgtttgtgccaagaatcgcctgattgaattggaattgcaaaagggtttctaaagcagccgcaccgaccatcgctttggttttgctcttaacacgcccacctaatagaaaggtttgaatttggtgatcggctaagagagaagcggtatcaaccccattggtgacgaccgtcaaattcatttcaggtcttaagtaggggatgattgcctgggtcgttgtgccagcatctaagtaaatgacgcagccttgttggatttgtgctgcggcaaacttagcaatcgcgtttttttcatgaacgttcttgccgtttttttcaatctggccaagttcttcttgtaacgtgttgatgcgcttagcaccaccgtgaattcgagtagcaagcccttgttcttcgagcaattgcaagtcacgacggacagttgattcagaagcgttcaataactggcacaaagattgcatcttaacgacgtcttgttgctttaaaagttgtaatatcgcttggtgacgttcttctgttaacatgacaaaacctccgtagcatcattatgacatcgtttccattcaaaagcaatcgaaatatttcaaaaacgttcaaaaaccatcaaaacgctgatatagaccgaaaaaaagattggtgcgttagtgagcaaactgcggacaatgccagaaatagaccagtttaaaagtaatgtaagagttttcaaaagtgcttaaggtatgctagactaatagatgacagggtggtatagcccaattattaggaggttctattcatgggaaaactaggcgtttcaatttatccagaacgatcaacttttgaaaaggatgcggcttacttagatttagcgcatcaatatgggttccaacgcgtctttacatcattattggaggtgtctggcgatcaagaagccgtgttaggcaactttaaacgggttgtagcccatgccaaccaattaggaatgcaagtcatgattgatatcaatccgggtttgttcaagcaactcggtatttcatatgataatttaagttttttccatgaacttggtgcttggggaattcggttggacaacggttttaccggccaagaagaagcggaaatgacgcgcaatccgtttaatttaaaaattgaaattaatatgagtcaagggacaagttacgttgataacattatgagttattcacccaaacgagaaaacttgttaggttgtcataacttctatccacatcggttctcgggattaggtgaagacttcttcaaacaatgtacggcgcaatttgcaaaatacaatttgaatacagcagcgtttgtcaattcacatgaagcgactttcggaccatggccaacacaagatgggttgcccacgatggaagttgatcgcgatttaacgatggcaacgcagatgaaacattacgttttaatggataacattgatgacattattgtcggtaatgcgtatgcttcggaagcagaattgaagacgatgcatgacgtctttaacgctgaattcccagcaatcgcaatcgacgtcgcagatgacattacggctgatgaacgcaaggtcctctttgaaagtctgcatagttatcgtggcgatcgttcagaatatcttctacggtcaacgatgacacgggtcatttttaaagacctgcttttcccagcccaccatacagttgacatccaacacggtgatattttaatcgataacgtcggttacggtcagtataaaggggaaacccaaattgccctcaaagccatgccaaatgacgggcgcgtgaatgtggttggccgtattacgcctacagaattattcctattagactatttgaaaccatggagccaatttaaattggtgccagctagccattaattaacgaataaaaagcgtactgattgaggtcactcactcagtgcgctttttatcgatgatagagccaattcagtgtttaaccagttatctgtttacttttaatctttttttcggtagtatataaggtactgtttaacgatgagaaggagtcaaaatatgtttgtagatcaagtcaaaattgatgtgaaagctggtaaaggcggcgatggtgcagttgcatttcgccgtgaaaagtttgtgccacttggcggaccagccggtggcgatggtggtcggggcggaagtgtcattttagtggtagatgaaggtctacgaacattaatggactttcgttaccgtcatcactttaaagccaatagtggtggtaatggtcagaataaacaaatgtacggccgcggtgccgaggatacatttgttcaagtgccacctggtacaacggtgcgcgatgctgaaaccaatgaattactcggtgatttaaccgaagatggccaacaattagtgattgctaagggcggtcgtggtggtcgtgggaatatgcatttcgcaaatgcccgtaatagtgcgccggaagttgccgaaaacggtgaacctggtgaagaacgcagcattcaacttgaattaaaagtgcttgctgatgttgggttggttggtttcccatctgttgggaaatcaacgttgttgtcagtggtgacaagtgcgaaacctaagattgctagttaccaatttacaacgttggtccctaacttagggatggtgcaactcgatgacggtcgggactttgtcttagccgatttaccggggttaatcgaaggggcttcagacggtgttggtttagggattcaattcttacggcacgttgaacgaacacgggttgtcttgcatttaatcgaaatggacgatcaaacgggtcgcgacccatttgaagattaccaacaaattaatcacgaattagagacctatgatccaaaaatcttagaacgaccacaagtgattgtagcgactaagatggatttaccaggttcttctgaattattagccgagtttaaacaaaaattagcagctgccggcgatacacatgagatttttgaaatttcaagtatcacgcatcaaggggtgcaatcattgatgaacaagacagctgacttattagctgaaacgactgaattcccaatgggagacgtcgaagaagttcaaacgcaaaaactttatcaatatcaaccggaagcacctgctttcatcattgaacaagatgaatacggcacgtttattgtgtctggtgacaaggttgaaaaactcttcaagatgagtaacttggatcatcaagatggtgtcatgcgttttgcccgtcaattacgttcaatggggattgacgaagccttacgcgaaagtggcgcacatgatggtgatttagtggcaattgataactttacgtttgaatttgtcgaataataggcacgtcaagaaaggaagacattcatttttgaatgcttcctttttctatgggatgcataaaataacagggcttaatgtaggcacatcactaaaatattgttataatagcagttattagaatgtagagtaggttgaaaaaatggcgggcaagaagcgtttaaagaatagtcgttacattactggctttgatggtttacgcgcaatcggcgtgattggtgttattttataccatctgatgccatatacttttaccggtggttatttaggggtcccaatcttcatggtggtttcggggtatctaatcaccgatttgttggttcaagagtgggaacaaaatcaatggattaatttaaaaagtttttacttacgccgggtaaaacgattgtaccctgggctgataacgatgctgtttgcaacgggcgcgtacatcacgctttttcagcgggaaatgttacagcaacttaatcagattattatcacgaacattttatacgtttataactggtggcaaattggacatggtcagtcgtatttcgatcggtttgccaataatgagtcgccgtttacccatctgtggacactatcgattgaagggcagttctatctaatttggccttttatcgttgtggccttgattattggtcttaagaataaaaatcggattgcccaagtattactagcagtcagtgttgtttcagcaatctggatggccattttgtaccaacccaatgctgaccctagtcgtttgtattatggaacggatacgcgggtcttttcaattttactaggagcagcgctggcgtttgtttggccatcaacagcccttaagcaaaagattgtgcctaaacaacgcctcgtcctcgatggcatcgggttagtgagtgtcctcagtttggtttggttaatggttaagttgaatgccgagagtagtcttgtctatcgcgggggactatttctgtttagtgctttagtctgtgttttagtggcagttgtcgctcatccaggcgctgattggaatcggttattgacgaatccggtctttaactggttaggtaaacggagttacgggatttatctgtatcaatttccggtgatgattttctttgaaataatcttcaaaaatatcgctgatcacccggttttatatccagtgattgaagtggcgattattttcggattgaccgaattatcctaccggtttattgaacagccactagcacactatccgtacaagcagttatggcaccaattgaagcaatttatgcaccaaccacattggaatcgggtggttggtcgagtgactggactcgcaattgtctttttaatcgggttagtcggggcgtttcaagcgccattccaaccggcgccagatacgcataaatcggcattagcggtcaatattaagcaaaatcaaaaagctaaccaaaagcgtaaggatgcgttgattaaaaaagcaaaagcccagaataaatctggacaagcaaatggtccaacttcaaaagctgaaaaagcggctgaggcggctgcgcaaaagcatccaatcaaccaagaatttgaaaaatatggcttgagtcaagtgacgattcaacgggcccagaatatctcggtgactgcaattggtgattccgtcctactcgacggtagtcaagctttacagaagttattcccgaatatgttggttgatgcggctgttgggcgccaactctatcaaagtattcaaattgtaaaagattatgatcaaaaacaagcccttagcgatactgtactggtcagtctaggaacaaatggcgcctttacgcaagaacagatggcgcaatttatggcagccattgggactaagcgaaaagtctattggctcaacgcgtttgtcccaacgcgtccttggcaaaatgatgttaaccagacgcttaaaaatgcaactaaacagtatccaaacttaacggtgattgattggtattcacaggctgccaaacacagtgactggttctaccaagataaggtgcatccgaacccaactggggtcaatgaatatgccgccattattaccaaagccctcgcggcaaaataaagcgttgaattaaagacagattggaagagctaaatggaattagaatttttaggaacaggcgctggagttccagcacgacaacgaaacgtcacaagtgtcgcattgaaattattggatgaacgaaatgaagtgtggttgtttgacgtcggtgaagcaacgcaacatcaaatcttaaaaacgacattaaaaccgcgcaaagttaaaaagatctttctcacacatttacatggggatcatttattcgggttaccaggctttttatcaagccgatctttccaaggtggcgacgaaccacttacgatttacggccctaagggaactgaagaatacgtgcgcacgagtttaaaaatctctgaaagtcatttaacgtatccattgaactttgtcattcttcctgaagaaggtgttttgattgatgatgcgactttccgggttgaatgtgctaaattggatcatcggattgccagttatgggtttcggattattgaaaaggaccatccgggggaactgcaagttgagaaactgcatgcagatggtgttccggctggtcctgtatacgcaaagattaaaaagggagaagtggttacactcgctgatgggcgccaaattgatggcaaagattacattggacatgctcaaaaaggacggattgtgaccattattggggatacccgccaatgtccaccaattgaacgcttagcggctaatgcagatgtattagtgcatgaagggacctttggtaagcaagaacaaaagattgcgcgtcaatatttccattcaactaacattaatgcagcaaaggtcgcaaaagccgcgcatgtgaagcggttattattgacccatatttctgcccggtacctcgggcaagcagtgcgtgatttacaaaatgatgcccgcgatatttttaaaaacacgaaagtagttagtgacttagatatctatgacattccgtttcatggtcgaaaggagtaaacagatgactaaattagcagcattgagagatttaaaccgtaaaattgtggtgattaccggcggctcgtctggtttaggacgagcaattgcctatgaagccgctagtaaaggggcaattatcgtcgttttggcccgtcgagaagctgaattggcggcggttcgcgaagaagcacaccggctttcaggacagccggcgtatgcatatgtcctcgatgtcagtgatccagcagcgattgaaaccattgtggctcaggtgcaaactgaagtcgggattccagatgtgttagtcaatgctgctggttttggaagttttgaaaatgcattcgacacatccatgaccgttgtggagcagatgttccgggttaatgtgctaggtttaatgtacatgacgcgcgcttttgggcggatgatgattgaacaaggtagcggccacatcattaacattgcttcaatggcgggcaagatggcaacgcctaagtcggccatctattcggcaactaagttcgcggttgttggctattcaaatggtctacgcttagaattaaaaccatttggggttcaagtgactaccgttaatcctgggccgattgatacagctttctttgatattgcggataagaccggtaattatttgaaatcggtcgattgggttgttttagatcctgatcaactagcttatcggattgtgaaaacaatcgggcatgcaaaacgtgaaattaatgcaccatggttgatggcgatcggtgcacaattctatcaactggcaccacatatcggagactatgttgccggtaacttattgaataagaagtagggggggggcagttttatgaaaaaacaaggtcgattaattacagtattggtcctagcattaattgtcgtaatttttgctgttttaaacgttgaaccagtcgccattaactttggattcacccatgttaaatggccattaatcatcgttattttggtgtcattattgattggcgccatcattaccttcttggcagcgactggcagcacgttgagccaacggaaagcacaaaaggaaatgaccaaagaagtcactgaattacgcgacaatcaagctgctcaaattaaagcagcggttgaagcagaaaaaataaagaatcaaagaacatttgataaagcgttagcagataaggaagctgaagtccatgaattacacgcgaaaattaatcaaatcacacaaacaagtgatcatcataatgcatagaaaaagaggttgagtgaagtgaaccccaaatattggacgaaactttaagcagctttctgggttgtaaaaattcgatattcaatcggacttttacaacccagttttgttttaattcttgaaaaattataatcatcaatccaaaccgatatttgtgaaactagcgtttcataagtatcggtttctttttggtagaaagcttcggctttcataatatggaaaaagctctccattgctgcattatctaaacatgttgctttgcgagacatactttgaaaaatgcgatgttctttcaagatatgagtccaatcttgatgctggtattaaaatccttgatctgaggggactgttgtccggtattttaaattcttagggattttcttagctgctcgattcaaaacagttgtagtaaattcaacagtagggtgtttactaacttgatggctgagaatttcacctgagaataaatcataaatacatgtgaaataggcgcgttcatcaattgtcttggttccccagcgaacttcagtaacgtctgttactagtttttgataaggacgatcagtgaagaaacgacggttgatcaagttcttagcaacggtgccaacattgcctctatatgaattatatttacgagtacgtttgttaaatgcagttgatagtaattgcagttctcgcattaagacaagtacttttttatgatttactaagatattcatacgatgtaattcaccagttacacgacgataaccgtacgctggatgattcttcttgattatttggatggtttgtttaacagattggtcagatgaaccgttcggttcatgactaataatgtattcatacgtacttttggccataccaactatttttagaatttttactagtttgtgtttaagccttagctcttggatgacttgcgcttgttgttttcttcttcctggactaaggctcttaatttttttaggtattcattctcgatttgtagtaattcattttcttctctaagacgttctaactctgtttgttgccgtttttttgattgtttatcagctgacataattgtttgccgtcctttggaacgatataaggcatcagcaccctcagtctcccaaatatgttgccattgccagatggtcccgacatttgagatattaaaatgaagtgcggtttccggataagaagccttattcgttttcatccattttaaaacattcatcttaaatgagccatcaaatattttttcgggtgataggacatctagtctttttgggccaaaggccttataacgttgaacccacgagacaactagtgagttactcttaataccatattttctcgctattaattcataacctaaggatgacgttagataatcctgaacaacttttatttttaatgtttcgcgcattttagaatcaagttagccactgtctcaaaattttttggacaaggcaaattacaagtttaatccgaacaagcccggaatctttcaatggcagtctgttgatgatgtatttttaatggtcgttgattaattagttcaagtgctgctaggatctcatcagtcgttacttggctaaaattggtctttttcgggaagaaccagcgtaaccgtctattaaagtattcattggaacctcgctcccatggtgaatatggatggcaaaaataaactttgatctgataatcctgttctaaggcctgataattggcaaactctttaccatgatcaacagtaatggattttacttggggaccgaaggcccccataaacttgccaaaggcggtgtttagagccttagccgttctattaggggctttgatggcccatagaagtcgggtcttacgttctacgaatgtaaccagacatgatcgtgactcacttcgactagaaagcaccgtatctacttcccaatgaccaaaagctaaccgttgattaacagttgttggccgttgctcgatggaagtcccacttgtaaatttcccacgattttcgctcactcggtgctggcggacattccgattgggtagatcagtcaatttgaaggggagccagccacgattaagccaattataaattgacgcagtgctcaagttataagcggtcgcaatggtttctggtgaccaggttaatcgtaagtgattggtaattaaagtcgctaatgctgccgtcagcatcgaacgacgaccgcaattccgccttttgcgatctgcatcttgctgagctaattctggatcataaggtttaactcggtccaactcatagctaatcgtagctttggcgacgcctaaggcgtcagccattacttggtaagatttattcccctcattgaccagttgtgctagtgcgccacgttgaaaacgtgataaagtagatgtacccaaagtaatcactccctatattggttggaattagctactaccattgtaagtgattgctttgggctttttaatttctgttcggattaattatagaatttgccacaataaaaaacatcaagaacagatatcctgtatcattgaagttcctacacaaacaatggaagaggatattgtcttgatgcagaaacaggataccacacaccgccaaaaaggtcagcacttaacatcactcgagcgcggaaaagtggccggattccgccaagctgggaagtccaatcgttggattgctgctgaaattggcgtctgcccgcagaccattaataatgaaatcaagcgaggtacagtagatcaggtcaagaagagtaatggcaagcgcgtctaccatcgacaatacctgccagaggctgctcaggcacgttacgagactgcacgcttgagctgccatcgtcctgacaagttcgccagcgtacaggtcttcttagcctggtacgtacagcgagctaagcaggacaaatggtcgccggatgcttcaatcggctatgccaagcgacacaagctgtttactcctgaagagcttgtttgtgcctcgactttgtaccagtacattgacgaccaacgcctagagattcgaaatatcgacctgttggagaagactaagcggaagacctctcaccagcaccacaccaaggctaagcgcctggctggccgcagtatcgaggaacggcctaaggtcgttgaacgacgcaggcagttcggtcactgggagatggataccattgtcggtaaacgcaatggcaaggagagcgtcatcttgactctgattgagcgcaagacccgttgccaacttctccgcttgatcgaaggacgagatgcagactctgtgagctatgcattgcgtggaatcaagcgcgaatggggagcttgcatcaagaccatcacagccgacaacggacccgagttcaccgccttaaatactgcttttgctgggacggaaactgagatcttctacgcccatccttacacgtcctgcgaccgtggcaccaacgaggcacataaccggatgatccgccaggacttccctaagggcatgtccctagatgacattagccctagagtcaagtgcaggccacgcaagaccgcttgaatcagttgcctcgcaaacaacagggctactgcacaccccagcaaaactttgaggccgaagctcggcgcgttcgccgcatggcccagtagtctctctagcgccacaacttctatttgataacggcctgttctgggattgtcctcaacgactggctaacttgttcttgcaatttacgatttttaatgttttagaatatttggtcaatataaaaacccccgatattggattttggtccaatatcgggggttcacttcagagacagattttgtcttagcctctttttttgtgttacttttcaggaagaactcgcctaccagctctccgtcttaagtctgatttataagcgaattacttgaaagtttgacctattttgactattatagaattagtcagaataatctgacacttaatttaaaaaataactgaaaaaggaatgacgtctatgaatccagaacaaatgacacaagctgtccaagatgcacttgcagaagcgcagaaaatcgcgatgacgcgtcatcaaactgaaattgatattccacacctctttaaatatttagtccaaccacaacaactaggacggcaaatttaccaagaagccggtgcagatatcgatgctcttgaggcggagattgatcgtgaaattgacgcaattccaacggttgaaggtcaaacgaattacggtcaaaacatctcacaaaacttgtaccaagtattaactgctgctgaaaaatacaaaacagaattccaagatgaatttttatcaactgagacggtcatcttgggcttaatgggtttgaaataccaggcactcgttcaatatttacagaaacaaaatgtcactgaacaaaaattaaagaaagtcattactgatttacgaggaggcgagcgtgtgacatctaaaaaccaagaagataattaccaagcgcttgaaaaatacggaacggatttaatcaaagcggtccgttctggcaaaatggatccagttattggccgggacgaagaaattcgagatgttattcggattttgtcacggaaaaccaagaataaccccgttttaattggggaacctggtgtcgggaaaacggcgattgttgaaggattagcgcaacgaatcgtccgtaaagatgtgcccgataatttaaaagataagacaattatttcactggatatggggactttaatcgccggggccaaataccggggtgaatttgaagaacgacttaaagctgtgttaaaggaagttaagaagagtgaaggtcggattctggtcttcattgatgaaattcacacgattgttggtgctggtaagactgaaggtagcatggatgctgggaacctcttgaaaccaatgttagcgcgtggtgaattacacatgattggtgcgacaacgttggatgaataccggcaaaatatcgaaaaagataaggcgcttgaacggcgtttccaaaaagtgctagttcaagaaccatccgttgaagataccatcagtattttacgtggtttgaaggaacggtttgaaattttccacggtgtccggattcacgataatgccttagtcgcagctgcgacgttgtcaaatcgctacattacggatcgattcttaccggataaggcaatcgacttagtagatgaagccagtgccaacattaacgtcgaaatgaattcacaaccaacggaattggatcaagcaacgcggcaattaatgcaacttgaaattgaagaagaagcgttaaagaaagaaaccgacgccgcttcgcaaaaacgattggctgagacgcaaaaacaattagctgatttacgcgaaacaacgaataatttaaagatgcggtgggaaactgaaaaagaagatttgaaccgcattaatgataaaaaagcggaaattgatgctgctaaacggcaattagaagaagcacagggaaattatgatttagaaacggctgctaagttgcaacacggcacaattccacaattagaagaagaccttgccgaccttgaaaaggctgaaaagccagaggactggatggttcaggaatccgttactgaaaatgaaattgcaacggtggttagttcccaaactgggattccagtcgccaaattagttgccggtgatcgacaaaaattactgcgtcttgccgatgttctgcatgaacgggtaattggtcaagatcaagctgtcaatgctgtgacagatgctgtattacgttcacgggctggcttacaaaatccagaccgtccgcttggctcattcctcttcttaggaccaacaggggttgggaagaccgaattagcaaaagctttagctgaggatttatttgattctgaacggcatatggtccgcattgatatgagtgaatatatggaaaaatattctgtatcacgattggtcggtgccgcaccgggctatgttggctatgaagaaggtggccaattaactgaagcagttcggcggaatccatacacaattgtgttattggatgaaattgaaaaagcccatccagatgtctttaacattttattacaagtgttggatgacggtcgtttgacagattcacaaggacggacggttgactttaagaatacaatcatcattatgacttctaacttgggttctgaaatcctactggacggtgtagatgaagaaggtcaagtttcacaaacggctaaggaaagtgttcaagccttaattcagacgaaattcaagccagaattcttgaatcgaattgatgatacaattatgtttacaccattgagcttgaacgatattcaagcgattgtggtcaaaatgcttcatgatctatcagaccgtttgtcagatcaagaattgacattgacgatttcagatgctgctaaacaatgggtggcagaagaaggttacgatcctgcatttggggcgcggccattacggcgttttattacgaaccatatcgaaaccccattggctaaagaaattattgccgggcatatgttaccaggaaccacggttgaaattaacttaaaagataaccagttagtttttgaaaatcgctaacgattgaaaaagcgctacaaatttaatttgcggcgctttttttggacatcaatcagggattattactgtcagattgatgtttgtatggtacacttattagggatgatgtacagaatgttagtgacgattaaggacgattccactttgaaagtggtgtcattaagagtcgttaatcaattgtttttctgtaattgacttgctcttagcggataaacatagtattatagaagtcgcggacaaaagtagcgggacacgtgatgatttaaaatcaatttgaatgggattgagataatccttgccaaattccccgagttcggtatatcattaatgaatctaagatataaaggagtctgaaaataatggcagttccagcaagaagaacatcaaagacgaagaaacgtatgcgtcgtggacatatcaaattgaacacaccaaacgtacaattcgatgcaactaatggcgaataccgtgtaagtcaccgtgtatcaccaaaaggtttctataaaggcgaacaagttgttacaccaaaagctaacgactaatcgtcatcgagagtttctgaataagaaactctttttttatgcagtttcctagttttaaatactagatggtggtataatgagtattgaataaaaggagattgataattatgaaaaatgaacacttgaaacaaaagctcgatcgtttacaaattgtacgcttaccacgttggacagacctgcccgatttggaactatatatggatcaagtggttagttacatcaatcaatacctaaacgcgttaaatttagatgaaatcaccgcttcaatgattaataattacgtcaaaaaagaaattgtggcagcaccgattaaaaaacggtatacaaaatcgcaaattgctcaagttttaattattgcactattgaaaacgagtttttcgattgaagaaatcaaacaattgatgacagcggaaacacctaaccgaaatgaaaagcaactttatgattactttatcttaacgtttttagcagcgattcatcagttagatgaggattacagcccctatgaccaaggcaaaaatccagcaggtacattggtcactgaaacccaacaaacattgctgaaattagcatgtcagagtgtggtatataagattgcaattgggattactttgaagaaagaaccagttgaagaaaaaacgccagcaaaaaataagtaattgactagaaaatgagaattgaattaagattcacaaataattcaattacaaaaataatgaattcgtttacctctttctattttcgccgtaaaataaaggtaactaattagtttattaacaaatgttagttaactaatttttattcagaggattaatcattgtggttaagtctgaaaaaaatgaaagaggtgttttaggtggcagaaaagaagaagacgaataagttaacgcttggtgcgcttattctaatggtctttacgtcagtctttggatttacgaatatcccacgtgcgttctacttgatgggatatgcatcaattttttggtatgttttagcagctgttaccttctttattccttatgcatttatgctcggagaaatgggagcggcctttggtgaagcaaagggggggatttactcttggatggagaaatccgttaacgctaaatttgcctttgtcggcacatttatgtggtttgcttcatacattatctggatggttaacgtcgggaacgggatttggattccattatcaaacgcctttttcggggttgataaaacacaagaatggtcaatctttggtttgacaaatggtgtgcaaacattaggaattttagctattatttggatcattgtcattacctttgtcacatcaaaaggccttgataaaatcaagagaatcaccagtattggtggttcagccattacgttaatcaacgtgattttattcttgggtggtttgttaatccttgttttaaataaaggggtaatggcacaacctgttacaacccatgcattcttccaatcaccaaatcaaagctatacatcgatgattcaagtcttcagtttcgttgtatttgcgatcttcgcttatggtggtcttgaagttgttggtggattagtagatgaaactgaaaacgctaaggttaactttccaaaagggttagctatttctgctgtcgtgattgttgtcggctatgctgttgggatctttatgatggggactttcactaactggaacttcgtctttaccaatggtggtggcttcgccaaagcaaccggttcaaacgcaaccgttactttggggaacgttgcttatattgccatgaacaacatgggttaccaattagggttagcaatgcacttaagtgaacatgctgctattcaagttgggatttggctcagtcgttacatggggctttcaatgttcttagcacttagtggggctttctttacaattattttctcaccattaaaaacaattatcgaagggacacctgctgccttttggcctaagtcatttactaagaaaaatagtaataatatgccggtcaatgcaatgaaggtccaagctgcaattgtaattgtgattattgccttcgttgcttttggtggtaagagtgctgctaagttcttcgatatcttaacagcgatgacaaacgtttcaatgacattgccatacatgtttgtggcatactcatactttggctttaaaaaggatgaaagtatcgaaaaaccatttacaatttataaagggaagaccttctataaattctgtgtctgcatggtcatgttcacagttggttttgcgaacgtctttacgattattcaaccagcaattgatggtaatttaagtcaaacaatctggtcagttgctggccctatcttcttcacaattgttgcattatatatgtttaaccgttatgaaaagaaaacaaatttaaaataagtttttaaaagagcggccgttaagtggtcgctctttttgattggtcttaaaaaatgtgacacttcgtcgttttcgcttgaattgtgattctaaaagggttaatctaagatttcaatgagttaaatttcaatgaaaaggtgacgaatatgaaaaaaacaattgttggtttagtgaccagcttagggctaatcggtctattggctggttgtgggacaaccaaattaacaacgactaaaacaaattatcgccaaaatggaatggtggcagtcgtaaaaggttcaacaaccaaaaaagctgatttacaataccggattaatcataatcatttccaaaaagcaacggtcaaagacggaacttatgtgattcaagtaccaacaacgactaacaaacaaacagtaacggtacaagctaaagcaaacggtaaaaccgttcaaaagaaggtaacgattgcagcgggcacatcagttggccaatatgccaagattgccgcgcaatacaaccaggctttaattgggatggcgttatctaaggcagatcaaaccaaagcgcaggaattgcaaaaacaagcagcagctgccaaagcaggccaacttgcacctgctgatctgatgacacttaagcagcggcaacaggaagtacaagcagcaatgcaacaggtgcaacagacacaaaaggatcaattgctaccaaccacacctaaaaatggggtgactgaatgggtcgcaacaaagcatgtcaccattcgcggttctgttgatagtcaagatgtaatggggatgacgctcattacacccgttaaagcgctcaaagataaagcggcattgaaagattttgggaccagttttgcattgattgcgcaagcaacgggcgctgattccaaaaaagtgatgtccgaatttagcgattatacgaagaaaaacaaaaaaggtagtcaaaccacgatgaagacgattgaatcaaatggtgtgaagttcaataccggtttttcaacaagtgatttgtatatttacattacaaaataaacgtaaaaagggccgcaacataaagttgcggcccttttttgtgctttatttagctggatcttttggtaagacaagaggtaagaagttgagcaaaagcccaaaaataactgagacgataacagttgtttgaatgttaaagccggttttcgttagtttagaaccgataaatccaatgacaaacccaaaaatcaatgtccaaagtagattcataacgtatttcatagttggccttctttctttgattcaattctatgatattgtaacacgttttccaaagagaatcatttgaaataatttgttatactaagagtaatcgaattaacgaagaaagaaggggcgttgcttgccattcgttcaactacaggttaagagtacctatacgctcttggaaagtaccactaaaattgatgcactgattgaaagtgctaaggcgcgcggctatcagagtattgcgctgacggataagaacgtgatttatgggctagtcgatttttataaggcggccaaggcagctgacttacatccaatcttgggtttaacgcttgaaattggcggattacttcaaaccgatgaacggtttccgctaattgtattggcgaaagatttagttggctatcagaatcttttgaagctttcttctaaagtgatgactcaaactgatctggtttcatttgctgatattacacagtggttcagccatttagtagtgatcacgccggctcaagatggcgaattagtccgcctacttttgcaagcggaggagcaaacaacggcatatttgacgcaactccaggcggcagttgatccggggagcttgtacttaggaatcagtgccaagcgagcagcagccccccaacttagcgggttaattgcattgagtcagacgaccggagttccgctggttgcattaggtgatgttcgttatctagaaccagatgatgctttttcagtgcaagtcttacaacatattaaagctggtacgcaagttaatctccatagtggtgatcagacaacgccaggcggctattatttacagactgctgatcagattacggccgagtttgaagcattgcagttggtcgaggccgtgcacaatacggataagattgcccaactctgtcaagttgagttgacctttaagcgggcccaattaccacgctttgaaacaccgcatcaagagtcggcaacggcatatctagaacagttaagtcagcaaggcttacaagttcggtttgccgatcaagcgattccgcaagaatatcaagaacgcttgcagtatgaattgcgagtgatcaacgagatgggctttgccgattatttcttaatcgttgccgatgtcatgcggcatgcccatgaacaacatattatgacgggcccagggcgaggctctgcggcagggtcgttggtggcctatgctttaatgattactgatgtcgatccgattcaatatcaattgttgtttgaacgttttttgaaccccaatcgggcgaatatgccagatattgatttggatatcccagataatcgtcgggatgaagtgctggcctatgtctatcacaaatacggtcggaatcatatggcgcaaattattacatttggtacactggcagctaaaatggcgttacgtgatgtggggcgtgtgtttggcttaagtcagtttgaaatgaatgattgggctaaggtaattccggacatgctgaaaatcacgttaaaagaagcttatcaacaatcacaaccattgaaaaatttggtggccgattccactcaaaatcaattactattcgagacagcacagaaacttgaaggactgccacgacactactcaacgcatgcggctgggattgtgttaagccaagcaccgttaactgatacggttgcattacaaagtggcggtgaagagattgaacttacacaattgccaatgggcaacgtggaagaactgggcctactgaagattgactttttaggattacgtaatttagggattcttgctaatattgtaaagcttgttggacagcaaaagggacagctgtttgacccacactcaattccgttggatgatcctaaaacacttgcattattccaacaaggtgatactaatggtattttccaatttgaatcacttggcattaagaatgttttacggcggttggcaccgagttcttttgaagacgtcgtggcgacaaatgcgttgtatcgaccaggtccgatggaaaacatcgacgtatttatcgctcgtaagaacgggcaagaacctgtcacttatccggacgcgtcgttagccgatattttagagccaacgtatgggatcttagtgtatcaagaacaagttatgcaggctgcgtccaagatggggggctttagcttaggcgaagccgacttattgcggcgagcaatgagtaaaaagaagaaggcggtgattgatgctagccggacgcaatttattcaaggcgcactcgaacgcgggcacacagaaactgctgctacgacagtctacgactatattgagcggtttgccaattatggatttaaccggtcacatgctgttgcttatagtaaaattgctttctggttggcttatttaaaagttcatcagccagcagccttttttgcagctttattaaatgccgttttgaacaatccgacaaaaacgaaaacttacttagcagaagctaagaaacgtcaaattaaagtgctgccacctgatattaaccgcagtcaaagttatttcagattagccgactcagggattatctttggtttgttcagcattaaaaaagttcggcgcgattttgtggcggcgattattcaagaacggacaacgaacggaccgtttaaatcgttactggccttcttacagcgtatggatcctaagtttctcaagcaagaggcattagaagccttgatttatagtggcgccttcgatcagtttaatccgaatcggaatgcgctgttgaccaacttagccgacctgcttgatagtgtgaagttgtcagggaataacgtcgatttatttgctgttttagcaccgaaagaacgtgccgtaccgaatttaaccttgactgaacgattggataaagaagccgaatatcttggggcctatgtttcggggcatccggtcgaaaaatatgattgtgtacgccaacactaccatgtgcctgatatcagtgatttggcacccgagcaaacggtccatttggtgctattcattcgccgaattaaggtgattcgaacgaaaaaaggcgatcaaatggcgtttgtaacggggcaagatgcaaccggtgaaattagtgtgacgctctttactggcgtttatcaacgggtcagtgaatggctacaaacaggacaagttgtttttatcaccgggaaagttgaacaacgtcgcgatttacaagtggttgctaatcagattcaattggcacaagatgcacaaaagacgctacccaaagcgaccctttatttacgggttcaaacggcgttgacgagtcaagtgcaacaacaaatgtatcaattgttacaacaaaatcacggaacaacgccagttatcttgtacaatgcggccgataaacagtcaattctattgaacgagcgctattgggttgtgagcaacgaaaaactaacgaccgcgcttacaaaccttttagggacgggaaatgtgattttaaaagggtttgaccaataaagaaattggtctatctttgcgaaaatcttcgcaaaagacaagacttattttctgaaaagtgataatatattagtgactttaaaagaccaattggttttttaagtaaaatatttgcctggggtgaaaagatgaaacgcataggtattttgacaagtggtggggatgcacctggtatgaacgctgccatccgtgccgttgcaagaaaagcaatgcatgaaggccttgaagtctatggtatcaattatggttacgctggtttagttgccggagatatcttcaagatggacccaattacggttggtgacaagattcaacgtggtgggacattcttgtactcagcacgttatccagaatttgcacaagtcgaaggacaattgaaaggtattgaacaactcaagaagtttggtatcgaagctttagttgtcatcggtggtgatggttcttatcacggtgcacttcgtttaactgaacatggttataacgcaattggtcttccaggaacaattgataatgatattccatttacagatcaaacaattggtttcgatacagctgtgaacacagtgctcgaatcaattgaccggatccgtgatacagctgctagtcacgaaagaactttcgttgtggaagtaatgggtcgtggcgctggtgatatcgcgctttgggctggtgttgccggtggcgcacaagacattattatccctgaacatgatttcgacgttaaggccgttgctgataagctacgtacttcacgtgaacatggtcaaaaacacgctgtcattgtattggctgaaggtgtgatgcacgctgatgaattctcagaaaaactttctgaatacggcgatttccacttacgttcaactgttttaggacacgttgttcgtggtggggcaccaacagctagtgaccgtgtgttagcaagtcgtttgggctcaaaagcagttgaattattgcttgaaggcaaaggtggcgttgcacttgggattgaaaagaacgaaattatcgcacatgatatgttagacttgttcaatcacaagcatcacgcaatgttagatctttatgatttaaacgaagatttagcttactagattcatcgttccatatataaaattgttaaaacgactgaaaagtcttttaaaaaatagacataaaaggagagattccacttatgaagaaaaccaaaatcgtaagtacacttggacccgcaagtaacaatgttgaaactatcacaaaattaatcgaagcaggtgctaatgtattccgctttaacttctctcatggtgatcatgaagaacatttaagccggatgaacatggttcacgaagctgaaaaattaactggtaaaacagttggtatcatgttagatacaaagggtgctgaaatccggacaactgttcaacaaggtaagaaatttgaattacacactggtgaagtggtacgtatttcaatggacgatacacttgaaggaacacctgaaaaaatcgctgttacttacccaggtctatacgacgacacacatgtcggcggacacgttttaatcgatgatggtttagtggatcttaaaattattgaaaaagacgaagcaaacaaagaacttgttactgaagttcaaaacgacggtatggtcggctcacgtaaaggtgttaacgcacctggtgtttcaatcaacttacctggtatcacagaaaaagatgctagcgacattcgttttggtttagatcatgaaatcaactttatcgctgcaagttttgttcgtaaacctcaagatgttttagatatccgtgaattattagaagaaaaacacatggaacatgttcaaatcttccctaagattgaatcacaagaaggtatcgacaacattgacgatatcatgaaagtttcagatggtttaatgattgctcgtggtgacatgggtgttgaaattccatttgaaaatgttccttttgtacaaaagaacttgatcaagaaatgtaacgctattggcaaaccagttatcacagctacacaaatgttggactcaatgcaagaaaacccacgtcctacacgtgctgaagttaacgacgttgctaacgctgttattgatggtactgacgcaacaatgctttcaggtgaaagtgctaacggtgactacccagtagaagctgttgcaacaatggctcgcattgatgaaagaacagaaaaatcattaacagaccgcgatgcatacgcattgaaagcatacagcaagactaacttgacagaatcaattggccaagctgttgctcacactgcacgtaacttaggaatcaagacaatcgttgctgctacagaatcaggctcaacagcacgtatgatttctaaataccgtccacaagctgacatcttagccgttacattcgacgaacgtacacgtcgtggtttaacagttaactatggtgtatacccagttatcgctaagaaacctgctaatacagatgatatgttcaacttagctacacaaacagctcaagaacatggttttgctaaagaaggcgacctaatcttgatcactgctggtgttcctgttggcgaacgtggcacaacaaacgttatgaagatccaattaattggttcaaaattaacacaaggccaaggtgttggcgatgaaacaatcgttggcaaggctgttgtcgcttcaaacgctaaagaagctgctgaaaaagcaattgatggtggtatcttagttgttaaatcaactgacaaagattacttaccagcaatcgaaaaatcaagtgctatcgttgttgaaaacggtggtttaacatcacacgctgctgttgttggtatcgctatgggtattccagttgttgttggtgctaaagacgcaacagaagctatcaaagatggcgaagttgtgactgttgattcacgtcgtgggattgtttaccgcggtgcaacaaacgctctttaatcattcctgaatgatgaaatgaagccccctctgaaaagagggggctttttttgttttaaaaatgcgaatcttgaattacttttctgaaagtactgacaagtcgttcatttatcggtacaatagtagggagactttattggaggtttacatggaaagttggttatttttagtagcgattttaatcgttgcattgttagcgaaaaatcaatctttaatcattgcgaccgcggttgttttaatattaaaggtattcccgatttcaaataaggtgctgcctgtgatccaagccaaaggcattaattggggagtgacagtgatttcggttgctatcctagtcccgattgcaacagggcaaattggtgtcaaagacttaatcaatgcctttaaaacgccggcgggttttattgcagttggttgtggcgtgttagttgctgtactatcagcgaagggtgtggggctattgtccgctagtcctgagatgacagtggccttggtttttgggaccatcatgggtgtcgtttttctaaaagggattgcggctggccccgtaattgcagcggggattacttataccattttaacggtctttaatttagtaccaattcattaattaataagaataaaagaggttaactatgaatgaattaatcgggcaagtcattactgccttagtaacagatgaaaatgaaacagccttctttgtccaaaaagacggcgtgacatttgaattaaaaaaagaaactttagaacaagaattgacaatcggtgaaacggtgactggttttgcttatgaaaactcaagtcgggaattgatcttatcaacgtttattcctaaatcacgcgtgggccattatgcctttggtgaagtggttgaaacgcggcgtgatttaggcgttttcgtcaatattggcttgccagataaggatattgtcgtatcactggatattttaccaaccattacgaaattatggcctaaaccaggtgatcgtttaatgattgcgattgaagtcgatcaaaaagggcggatgtggggccaactagctgacgaaagcatcttcagatcaatttcaaaaggtgctaaaccagaaatgaagaaccaagacgtgatggggacggtctaccgtttgaagttagccgggacgtttattttaacggatgacttttacattgggttcattcatccttctgaacgtgaagcagaaccacgtttgggtcaacaggttaaggggcgcgtcattggtgtgcgacctgaaggtagtttaaatgtcagtttgaaaccacgggcatatgaagaaattggcgacgatgctgaaatgattatggctgtcttaaaacggcaacctgattacgcaatgccatacactgaccggagcgatccagaagcgattaagagttactttgggattagtaaaggcagttttaagcgggcattaggccggttaatgaaaaatggcttaattactcaagcagagggcctaacgagtttaactgaaaaaggtcaagctgatattgccccaattacagatgacgagaagcaagactaagcttttttgaatgattgaaaaggaagttgctaaatggataaagctgagcaattagaccgaatatccgagcagctacaagcggccggctacaagttaacagcacaacgctctgcgacggtggcggtcattttggaccatgcccaagcgcatctgagtgccgaacagatttttatggcaactaaagaggtggtccctgaaattgggttggccactgtgtatcgcacccttgagatgttgacggaactgcatgtgttgaataaagttcggttcattgaagatgggatgacccactatgacttgtgtgagactgatcacgaccatcatttccaccatcacctgttgtgtctgcaatgtggggcaatcgaagaaattcatacggatttattgcctgccgtggaacaacaggtatatgatgattacacatttacggtgttagatcatcgtttaacatttcacgggatttgtgcacgttgccaacagattaaccaacaaaatgggttaccagccaatcaactggatcctagtcgccaaattgacgtgacgcagttgtaaaagaggaagtacatggatgatttaattcaagattatttacattatttaaaagttgaacgcggtctttcggagaatacgcgccagagttatcggcaggatttacaacagtttgcggcgtttttacaacgtcagcaggttgccaattttactgaagaccgctttttaattttgaactacttgcaagaacaaactgatgtgcataaggcacaaagtagtattacacggagcatttcaacgttacgtaaattctatcagtatttagcgcgtgaaaagcagattaaacaaaatccgatgctccaaatcgattcgcccaaacaaggccgtcatctaccggctgttttatcgacggcggagattgagcgactattggcggcaccagatacgagcaccgcacttggattacgagatcgagcgattctagaggttttatatgcgacggggttacgagttagcgagctgattcatctaaagatggctgatttgcatttatcactgggcttaattcagaccctcggcaaagggaataaggaacggattataccgattggtgatgtagcggttgattggattaatcaatacctcgatcgtagccggaatcaattaacgaaggggcgtgctaacccgtacctgtttgttaatttccatggtaacgggttgacgcgccaagggatttggaagaacctgaaggcacatgttaaaacggctgggattgaaaaagacgtgaccccacatacattgcggcattcgtttgccactgtgctacttgaaaatggcgcagatctgcgaattgtacaagaattattggggcattcagatatttcaacgactcaaatttacacgcatattagtaagaaacatttgacagaagtttaccaatggagtcatccacgcgattaaattagatttgtcgcgctttataaactatggtagagttaatgctattagaactttgtttgatcaatggaggtcaacatgttattcaagtataaaaatgattatgaaaagattgcgatgggctttttatccttcgtaccggatttaaaagaagtcagtcatgtacaagctgaattggcgctctatacgtcggatgagcaacgcaatttatatttatggcgcaatgaagccggcgattttgccggtgttgtggggattgaactgggtgcggactatattttagtgcgccatatttcactgaacccttcggaacgtagcgacgagaactatttcaccatgttggatgaattagcggcgctttatcctgaaagtcgcgtgatgggttcgttagagactgcgccattgattgctaaatgggaacaacatcagaatacagaaatggactagattgaccaatgactgaacaattaacgttggtcttgactgattttgaaggaccactcgatttattattacatttaattaagcaaactaagattgatatttatgatattcccattgctgaaatcaccgcgcaatatcttgattacttgcaccaaatgcaagtattgaaactagatgttgcaggtgattatttagtaatggcggcgacgttgatgaagattaagagtaagttgctcttacctaaggcacctgaattaattgaagaagaaacagaagaatacgtcgatccacggcaggaattagtggaccaactattggcgtaccaagccttccaaaaggtcgcaacggttttgcaagagcgcgaattggagcgccaacagctctttgctaagccagctagtagtaatccagctgaaaaagtggtcccactggcgcgcggcgtgattaagccacgcgatttagcggccgcagtttctaaaatgttggtcgaagcccaagctaaacaaccggtcttcaaaacggtccaaaatgacgaaatttcgattacggataaaatgagttggattgtgcgtcatttagccgctcaaccagttgcttttgaagcgttggtcgttgttaaaacagatcgagatgaaatcgtcacaacatttttagccgtactagaattgatgaaggatcgaaaaattatttgcgaacaagccgactatgatgcaccaatcatggttcggttgaaggagggcatttcagttgaatcatctcgctgaaattgagagtttattatatgtcgcgggggacgaaggaattgcgcttgcgcaaattgcgcagcttattcatctcgatgaaccggcagtccgccagttattagaaaaattggcaaatcgttaccgcggcaacactgaatcgggtttgaacctgattcaagccgaagatatctataaattagtcaccaaaaaagaatacgcgacgttgttgaagacctattttgatggaccggtgtcaactagtattagtcaggccgctcttgaggtattggcaattattgtctatcgccaaccaatcacgcggattgaagtcgatgaggtccgaggtgtccaaagtagtggggccatccaaaccttgttagcccgccaattaattagcgaaaaagggcgtaaggatgcgcccggtcggccaattttatatggaacgagcacctatttcttagattactttggtcttgaatcgctcgatgaattaccaccacttgaacaattggcacttgacgctgatgtcgatggtagtgaaggtggtacagcagacttgtattaccgtcaatttgaacaaacgttaaatgaaacagatacgacgtcggaagagacgtccaaaggagaacaataaatggaacgattacaaaaagtgattgcaaatgctggggtagcttcaagacggaaagcagaaaccttaattgcaactggtcacgtcaccttaaatggtgaagtggtgaaggaaatgggtatcaaggtggatagcacaagcgatcatattgaagttgacggtgtgccgttaacgcgtgaacgcaaggtctattatgtcttgtataaaccacgccaagtgatttcagcagtgacagatgataagaaacgccgggtcgtcactgaataccttggcgatatcgttgaacgggtttatccaatcggccgattagattacgatacatctggcttattactactaacgaatgatggtgattttgccaacatgatgatgcatccaaaatataaagtcgacaagacttatattgcgaaggtttcaggattaccaactgcagatatgttgcgccaattgcgtaaaggaattgtcttagaaaaacgcaaaacagcaccagccaaggtcaaagtaatttcaactgatcggcgtaagaacactgccattgtaagcatcaccattcacgaagggatgaatcatcaggttaagaacatgctagctgcggttggcctacccgtaacaaagttgaaacgggaaacatatggtttcttaacgttagatgggttagtttctggcgaataccgtgctttgaaaccaatcgaagtcgcagaattcaaaaaaattgctgaactaaatgaaaaaccacagcataagaatcgaccaaaattatcacggcatgattaattagttgcttttggcacgttgatttgctatgcttatttcgaacaaaatattaatggttcgtcttcaggggcagggtgtaattcccgaccggcggtaaaagtccgcgacctgctacaatgttgattcttgtggtggctgaactggtgtgattccagtaccgatagtgaaagtctagatggaagaagatagggcttatttgggtatgaatgtatgcaagtaaggtctgttaatctccctgattaacagacctttttgatgcaatcagacttggctaagtccgctgacgaaggcaacctcatctggagggtgttagtaatgcaagtttcaaaagttcgtacgatgattggggtcgcaatgctaggggcaatttcatttgtcgtcatgtttttcgaatttccaattattctcgcatttccgtttttaaaaattgattttagtgacgtgattgtcctgttagggacgttcgtttacggaccaattggaggaatgggggtcgcattgattcgctcgacgcttcatttcattatgaccggtgctagcttaccgagtttggtcggcgactttgccggtgtcttggcgtcaatctgctacttgttaccattctattatttattcaagcgtcaatcgaacgttttagtaggtcaagcaattgctggtgttgcgggggctgtcagcatgacgatcttcatgtcatttgctaactggcttttcattttaccgctctatattaaattgatgggtttgaacttaggaatgtcgactaccaaatacattctatttggattagtaccgtttaatttaattaaaggtgcactcgtaacggtggtgtttgccgttttatatttacggattttaccatggctaaaacaacatatgcaaaaaccaattgccaaataaatggcagcaaaaaaggttgtgtccaagcgggcacaaccttttttataggacgtaaatatgctacgataaaaatggcgttgattggcgtacaatcgcaccagttggacaggcggtgtaggcggttttaaacgcaattcgttctttaggatcttcaattggcgtcgttccctgattatgatcgggtttaaaaaaggcgatcccttcttgatcgtaatcgaataagtcgggcgcctttagctggcagagaccgcaggcgatacagcgttccgggatgacttgactatagagcattaaattcacactttctcaataaaggacttaattgatgatgttaatggcgtatctactatgcttgttggcgcctgagaaaaggcggtatcaagcaatctactataccttaattggtaaacgaactacttcaaatctgtatgccggtttagcatatggattattaaaatggctccaaatttatcctaatctagaacaggcacaatttcaagcagaattaaaacgacttcagcaaaatggttggattgaaatcgatgagcggtatgtttggttgactgctaccgggcaacaaaaacaagctgaatggcagccgcaattagtttggccgacgcactatgaaggcccacagatgggtcacttaccccaattcactgctcgttttatgttggccgttcaaattgtgtcggaatatcatcatcaaaatacgcagtactatccattggaaacgagtatgaaggaccgcgtgttggtggtcagttggtttaagcggcataaggcaaccatcaattttagcagtcaattccagctagaattggcgcaattacttgaccagttagatccgcaacaagccgatcttgtggcaaatcaactgatcggacatcaagtcttgggcaaaagccaccaacaactggcgcaagccttagatagcccatccttgacagttcgtgtgcggaccatcgacgcctttgctcaaattttagggcttttattggcgcaccaaacgacttatccgctattgaatgaattagtggatcaggctgaaacgcaattgagtcagagtacgttacagacctggcaattgatccaacaaggggcgagtgttaaacaaatcagccgccagcgccgggttaagatcggaacgattaaagaacaccttttagaaaccgcgatgttactcccacggtttccgtttgaacaattcttaaaggatgcaactacacaaaaactagctagattgatgactgaacagccatcgctcagctataatgaagcacaaaccgcactccccggtctagatttctttgagtatcggctttatcaaattcaaaggcaggtgaacgcccaatgagcacggatgaactgatttataaaacgctaaaagagcggtttggctatgagacatttaagccaggacaattagaagtgattcaatctgttttggcgggccaagcgactttggcggttttgccgaccgggacgggaaaatcattatgttatcaattaccagcctatcttttgggccataccactgtcattatttcacctttaattgcattgatgcaagatcaggtcgcacagttgaattaccaaggtgaaaaaaaggcagtcgcgattaattcaaatttggaaccgcggcaaaagcatgcgttattgcgacaattgccacagtatcgtttcgtgtttatggcgcctgaaacgataagccagccggcggtcattcaagcactacaacaatgccagattgatttattggtcatcgatgaagcccactgtatttcacaatgggggattgattttcggccggattatttagtgcttgcgcaaatcaagcaccaattaaatccgggggcaacgctcgcactaactgcaacagctgatgcacaggttcggcatgatattttagccaagctagatttgcagtcggccaataggattattacgtcggttgatcgtcctaatatttacttaggggtgagtcaacaagcggatgaagcgagtaagcacgcctttttgcaacaattggtaactgagagtcaggggcccgggattatttatttttcaagtcgtcaaaagaccgtcgagattgcggcttttttgcaacaaaagacagcgatgcgagttgcctattatcacgcagcgctttcgccacaggagcgcttcattattcaacaacagtttatgcaagggcagttggacgtaatctgcgcaacgaatgcatttggaatggggattaataaagccaatattcgctatgtgattcactatcatttaccgcaaaatatcgaaagttatctacaagaagtcggtcgtgcagggcgcgatggccaaccagcctatgcaatgttgttagcaacaccgcaagatacgtatctgcaacagtcgttagtgtcatttgggattcctgaagctggattgattcggcgtttctatcaagaaccgacattatttaaacaaagccaaggcaacgagtttgaattattacggcggtatcagcaaattgggatggatgaacaggccgttagtgaactgttacagaatcggcaaaaagaaaagcgttttgcgcttcaaacaatggttgattatttaaacttacaaggctgtcggcggcaatttattgtgaactattttgacgagcaaccccaacaggttgcccatgctgatcaatgttgtggtcaacaggattcaacggtctttttagaaaaatttaatttaaaaacgttaactgatgataaatcccctaaaatagacgggttagaccattgggacggtattttgaagcaattgttttagagattttctgggtattttaaaagggtctatggtacaatatcaaagaataccaatagggagggccgtcaatgctcaaagatgataagaaaaaattagataatcagacggaagacaaaccctgggaaagccagtttgatgatgatcgtgatgatcgcgggaatttatcgcgtgttgcttccaagagtaaggaaaaaggaaatacatattttgccattattctaggtgtattgcttgttttaatgattgcatttccgattattgcctatacgattcattctagccgggctaaccgcccagtcgagtctagtaagattgtcgttaatacttctgatagtgatagtgcttctaagaaagaagctaaaaaagcgaagtctgctagcgaaagtgctaccaaagcggccagcgaaagtaaagctaaacaggctgaaagtgaaaaagcggctagtgaaagccaagcagttgaaagtagcaaacaagctgcagaagaagctgaaaaggctaatagtcaaagccaagctcaagcagacgctcaaaatagtagtagcgaagaaacaacaactgaaagtagcagttcaagcgaaacaacgggtggttcttatacgttgaaagccggcgaaggtttataccgcgcagcggttaataacggtttaacactcgatcaactacttgcattaaaccctgggttaacagccaattcacaagtggcaccaggcacagctctaaaagttaaataatcagtactaccaaaaggcctggggaaactcccagccttttttaatgattttttcaggaggcagaacatgcaaattgcaattgatggaccagcatcatctggtaaaagtacggtcgccaaaattgtggctactaaattagggttcgtatacgttgatacgggtgctatgtatcgcgcatcaaccgtgttagcacagaagttagggttagacttcggggatgaagcgggaattttagcagctttaaaagaagcagatatccaatttaaacctgaccaagcagggcaaaaagtcttcttgaatggtgaagatattacattagccattcgaacccctgaaattacgaataatgtctcacaagtatcagctttagctggtgtgcgcactgagatggttgcacggcaacgtcagattgcagatcaaggtcaagtcgtcatggatggacgcgatattggaacaacggtgttacctgctgcgaaggttaaaatttttatggtggcaagtgcccaagaacgagctaaacgccgttatgctgaaaatacagctaaggggattatgacgcctttagcaacgctacaagcagagattgaattacgtgatcaaaaagatagtacacgggccatttcacccttaaaaaaagctgacgacgccattgaaattgatacaactcagttaacaatcgatgaggtggtcgacacaatattagcaattgtaaagaaaaatatgtaattttatctttgaacgaggtaaaataactggtaatccgaatagatatcaactaaaatagtaactgtatagatagtcgttaaggaggattttagctatgagtgaagctaatttgaataacacccaaagcagcgatgcaatggcagctgctttagacagtgtccacgaagtcaaaattggggacgttgttaaaggtgaagttttagcaattgaagatcgacaagtgattgtcggcatcgaaggaactggtgttgaaggggttgtgcctcaaaaagaattatcaagtcaacctattgaagacatcgcagacgttgccaaagtaggcgaccaattagatttagtggtcatttcaagaatcggtaacgataaagaaaacgggagctacttattatctaaacgtcgcttagaagcccgtaaagtttggtctgaaattgaacaaaaatttgctaatcaagaaacaatcacagctaaagttatcgacgtggttaaaggcggcttagtcgtcgatgctggtgtccgtggcttcgtaccagcttcaatgatttctgatcgtttcgtacgtgatttaagcagctttaaaggccaagaattaaccttacaaattattgaaattgaaccaagtgaaaaccgtttaattctttcacgtaaagcattattggaacaagaacgtcaagctaagttacaagcagtttttgaaaaaatgttacctggggatgttgttgaaggtgaagttgctcgtttgacaaactttggcgcattcatcgatttaggtggcgttgacggcttagtccacgtttctgaaatttcatatgatcacattaaccaaccttctgatgtcttagaagttggtcaaaaagtgcaagtgaaagtcttgagcttagaccaagaaaaaggccggatctcattatcaattaaagatacgcaacctggtccttgggatgatatcgctgataaagcaccagttggtagcactttagaaggggtcgttaaacgtttaacaacatttggcgcctttgttgaagtcttccctggggttgaaggtttagtgcatatttcacaaatctcacatcaacatatcgccacaccaaacgatgtgttagaagaaggccaaacggttcaagtcaaggtcttatcagttgatcctgaacaacaacgtttaggtttatcaatcaaagcattgcaagaaaaacctgctggtgctaaggattcagaacacgaagatgtggcgccttctgactatgtgatgccagaagaagaaacaggtttcagtatcggcgacatgcttggtaaaacattagacgataaataatttttttaaaagtcatatgcaaaaaggtagggtctgggacaaaactaggttttgtcccagaccctacgtttatgtcggtgattgattagtacgacgcagaggaagcggaagttcagcggactttgtcggagtgaccttgtcagtttggctcagacagggtacactgaacaacgaagggaatgaatacaatgacaaaaccagttatcgccattgttggtcgacctaatgtcggtaaatcgacgatttttaatcgcattgccggtgagcggatctcgattgttgaagatacgccaggggttacgcgtgatcgcatttataccacaagtgaatggttagggcatgaatttagcctaatcgataccggtgggattgaaattagtgacgcaccatttatggaacagattaaacaacaagcagaaattgcaattgatgaagcagacgtgattatcttcttagtgagtgcacgagaaggggttactgatgcggatgagcgagttgcacaaattttataccgcgctgacaaaccgatcttacttggggttaataaggcggataatccagaacaacgccaagatatttttgatttctatagtcttggctttggcgaacccatcgccgtttcaggggctcatggtcaagggttaggtgatcttttagatgccgccgttgctaagttcccagctgaagatgacgaagaagaagacgatagcatcaagtttagtttgattggccgtcccaatgttgggaagtcatcacttgtgaacgcgatgttaaaagaagaccgggtaattgtctctcaaattgaagggactacgcgggatgccatcgatacgaagttcacggctgaagataatcaagaatttaccatgattgatactgccgggatccgtaaacggggtaaggtctacgaaaatactgaaaaatacgccgtaatgcgtgcattacgtgcgattgaccgttcagacgtcgtattagtcgttttgaatgctgaagaaggtattcgtgaacaagataagaaagtggctggctacgcacatgaagctggtcgtgggattatcatcgtggttaataagtgggatacacttaaaaaagacaaccacacgatgaaagagttcgaaaatcacgtgcgcgatcaattccaatacttagactatgcgccaatcatctttgtatcggctaagaccggcgttcgcttgcaaaacttgccagcgatgattgaacaagtgagtgaaaaccaaaaccggcgcatccaatcagcactcttaaacgaagtcttgatggacgcaacaacggtgacaccaactccagctattaatgggaaacgattgcgcatttattacatgacacaagtagcggttcaaccgcctacatttgtggtcttcgtaaacgatgttaacttgcttcatttctcatatcaacgtttcttgaagaatcaattacggaaaacctttgactttactggtacaccaatccatttgatccctcgtcaacgaaaataagctgttttttcaaaaatccgctaatatgattaactaatttgctcagaatgctgttttttagcgaaattccttgctatcactaggtttgtgtgataaattaaaaaatgaaatggtgatcaaatcattgtttcgtcatttttgaccactcaaaaatggtttcggtaattaattactgattatctgtgatgagcaggaggtgaaaaacatggcaaacaaagcacaattgatcgaaggcgtagcatcaaagactggtttaactaagaaggatgcaactgctgcagttgatgcagtatttggttcaatccaagacactttgaaaaaaggtgacaaagttcaactaatcggctttggtacttttgaagtacgtgaacgtgcagctcgtaagggccgtaacccacaaactggtgcagaaattaagattcctgcaagcaaagtacctgcattcaagccaggtaaagcattaaaggattctgttaaataagaattcaatttataggctgggatttttcccagtctttttttattggcaattaatccgaatatgttaaaatggaacaatcgaaaaagggtggttaaatgacgaattcagaacaaatgcttacagcattagaagataataatttagaacaagcacagacttacttccaacaagccttagttgctgatgaacccgatacgctctacagcttagctgaagagttatatgcgatgggttttttggaacaagcaacgacaatttaccaacaattgttggcccaatttcctgaagaagatcaaatcagaacaacactagcagatattgcggtcagcgatggccaatacgacgacgccttgaacttgttggcagatattacgccagaatccaatgcgtacgccgaaagtctgctgacggcagctgatgtctatcaaacaatgggcttaccagaagttagtgaacaaaaattattgacggcgttgcgcttatatccagatgaacccgtcatgcaattcgcattagctgaattgtactttgaaatgggtgaatatgtgaaggccgccaattactatgagacgctaatcgaccaagacgttgttgaactgggacaggtgaatattcaaaagcggttggcaactagttatgccagcagtggggcttttgaagaagctttgcagatttacgaagggttgacgccagaatttctaacagaagacgatcaattccagatgggctttttgtacttacaaattaaggattatcaaaaagcaattgaaatcttaaccaagttacagacgactgatccacaatatacgtcactatatacttacttggcagcagctcaagaggctcagaatcaattagaagacgccttaacgaccgttcagaccggaattgggtacgatgcctacaacgaggtcctctatcaaaaggggagcgatctagcgcttcaattaggcaataacgaggttgctgaacagatgctaaacgaggccctcaagattgatcctgataatatgggcgaaattagtgccttgagccaagtttatcgccgtcaaggccgccatgccgaaaacattgctttcttacaagatgcgattgaaaatcataaaccaacggctgatttatattggtcattggcgcaatcacagatggcggtggatgatgttgaccaagcgcgcgaaaattatctgttagcttatcctgacttgaaagataactcggactttctacacgatttaattttattcttccaagaaatggcacaggtcccagaaatgttagcggccctcaaacaatatttgaagctcgtgccaaacgatttagagatgcaaactctctatgacgattaccaagccatgcaataatgcaaaaaaacgcccgactattactttagtcgagcgtttttttgcgtctttagtcgcgtttcttccccagatgaaagtggtacattgaagaggaatcgggaacaggatttatttggggaggtttttaggatgacaaacacaatactttcggttgcccaactaacacaagtggtgtcaattgggcagtctgaccagacgacaaccttattgaaaaatatttcgtttacggtgcaaaaaggggagttggtcagtattgttgggccttctgggtctggtaagagtacgttgttgtattgtatttcagggattacgcgacctacaggcggcactgtggcaattgcggggattaatccgtatcaattgaaacccaatcaactagcggcttttcgcagacagacgattggctttatttttcaacaatacaacttgattcagtctttacccgtctttgaaaatgttgtcttacaacagcgcttgagtcatcagcaaccgcaacgtgctgagattaaacagttactgaccaaaatgaactttgcgggacaaatcgatgggcctgttgcgactttatcgggtggtgagcaacaaaaagtcgcgattgctcgcacgattctaactgattgtgatgtgctatttgccgatgagccaacgggtgcgctagattcggcatccaaagcgattatttttacatatttcaaagagatggttgctaaagggagaacggtgattatggtgacccacgatattgagctggctagtcagacagatcgtgcgattgtattaaaagacggtcaggttcagcaaattgtgactgaaccgacacttgcgacaatctatgctgccttggatcaggtggtgtaagcgatgtggacaatcagttggttacagttaaagcattcctggcggcaatggctagcaacaataccagtttttgtaacagtgggtttaatcctcggtttttgtttaacgggaattgtgaatgtggcacagtcgcagcaagttgatctatacggtccgaatacaccgttgccgatttttatcatgccggtattttttggtggtattacaatggtaatcgtgattaaagaagtcgtgcaccagcttttggatcagtttaaaacggactatcgaatgcttgcgattctaggggcaacgatcaatgcactggccgctattttggggatttaaatcggaattgtcagtggggtgagtgctctgctcggcggagtcgttgccttgccactaacgcgtttttgttatgcgtggttgcagcagattgttgggccccaaatgttgccgaatatgccaattcatttttcgttcttggcacttttgttaacggttgtcttggttagtctaattgccggtagtggtggtttttggcatgcacgccatcaactaaaagatgggaataagcatctcagtcaccgacggcggatcgttcgtagagttaggacgattgtttcgttaatggtcgtcagtgggttaattattaaactaacgatgcaaagcatggcgttaacctatgtcggtcattccgagaaagcaattggcagtctcggcaattcggttggcaacctgaatctcgtgttgttcttattattaattctaattgcgcttaccggacacacggtattaaaattaattagccacgtgctctattggttaggtgctagaacgctctttttgaacatggcagcccatgatattgactatactgctgaaaaatatttgccgttgtatacgccagtgacggtcattgcggttttaattacggggatgtcggcaattatgtggaatataccggcctatacaaataccacgagtgccaacaatgaacgtttggtgaatttcattttgacaattggtttatatttgggcgcgccgttactgattgtattagcgaatgtattggcgacgctgttagtcgcaaaagaggataatgcccagcaaatgcgccaattacagttgctcggtttaacaaaacagcaactattgctgacacaacaatcgcatgcagtgatcttagttggtgtttgtcttgcagtcagcctactagccgggggcttagtttggagcctgacgattcatgtcgggcgaaccattttgtaccaagcacccatctcaatggcggctttgctcgctggaccgtttttaatggccgttagtatgctttgcctgctaacgatagttaatttagctcgtgtttattgtgggaaatgtttaactaaagcataaaaaagacagctagtgcatttttaagtgcattagctgtcttttttattggttttgattgcggttaagaatgtcctgcgcccacgcgcaccattctaattctgttgcgcagaccattaagcgccgtttcaaaatcaggtaacgacctaagtttttttgcttttcggtgggatcggttatgaggttgtattcttgcatcttatgttggtattgtttttgaattttttggtaatgatggcggcgatcttggagtaagtcagctgcttgttcttgattgaacagtgaaataacgtaaacttttgctaaaaactcgtcacgttgtgtgggtaaattcgtttcttcttgaaaccagtcagtaacgacgagttggccggcttctgttaaatgataaatcttcttttgtttatgaacgggatcaattttaaccgtgacatagccttgttcgtgcagtttatttaatgccgtgtagatttgactgtggtgtgcttcccaaaataaattaatgtactgctttaattcgtagccgctacacggtttgcgaactaacatacataataaaatatagctaagcgtactcatattatttcaccctttaatcgattaattattgctcagtataccatatttagagtcaacaaacatgtcactatattatgtcaaattttaatgtaaaaattgatatgttttgcaatctaatgtagtttatataaagagaaagagagtgatatgttgctggagaatcaaaataaagggctacgctcggcgtatgccgttgcatttacgtgtatggttgcatttatggggattggtttagttgatcccattttaaaaacgattgcggttaaattaaatgccacaccagcgcaaacgaccttactatttacgagttatatgttggtcacagggattattatgctatttacagggtttatttccactagaattggtgcgaaaaaaacgattagtattggtttgatcattattgttttatttgcggcgttagctggtcgttcacagaccattacgcaattaatttcgctacgggccggttggggctttgggaacgccttgttcctatcaaccgctttgactgcgattgtcagtgtgatgcctgaaaaaacggaacaagcgattatgttatacgaaggatctttaggaattgggatggccgttggaccacttgtgggtggcgtcttagggagtctttcatggcgttttccgttttatggtgtcgccattttgatgtttattgcggcgttgaccatcatggtttcattagaaccgattgctaaacctgctaaaagggcgcttttttttgcaggggctgtcgcgttaaaaaatcatcgtttacgttcaatcgggattattgcattattgtataatttcgggtttttcacgattttagcgtatgcaccattcttattagttgggttaactgaattgcaagttggttttgtctttttcgggtggggcgtgatgttagccattgcatcggttttcattgcaccacggatggaacaaaaaacgaatacccttgtgacgttgttgtttgggttaagctttttcttgatctgcttaatggtgatcggtatttatgcagatcaaccagccttagtggcctttggcgtcatcattgctggtttcttccaaggcttggtgaatacgttgttaacgacggttgcgatggaaaatgattcgattgaacgcagtgttgcatcatcggcgtatagctttattcgctttactggcggggcaatcgcaccatttgttgctggtaaaatcgctgagaaatggtcagcgcattggactttttattttgcgagcttaatgattttaattgggattttctttgttctgcgcaatcaaaaatattttgtgacggttgaagaagttgaaaaagaaattgagttaactgagggacaggaattatcataaagacacttaaaaacgccagcgattaatcgctggcgtttttattgattagtcgtacgtaaagccttccccgagtgcttcgtgcacatcaataatggaaacgaatgcgtgcgggtcatgttggttaatcaaccgtttaagataggcgatttcacttggactgacgacacagtacagcattggtcggtcttgatgggcataagcgcctgtggcctgtagaaacgtcacgccgcgttccatatcggccagaatgtcatcggcaattgcttgcgcgtggtcactgattacgagtagccctttggcggcgtaagcaccctcgagtgtgaagttcacaatccgggagaagacgtaagacgcaattaaggtatacatcatatgttcgatatcgaggtaactgagtgagagtgttaagactacgacgtcaaaaagaaggagggagcggcccattggcatccctttttctttttcgataatgcgggcaatgacgtcggtgccaccagttgtgccaccgaagcggtagataatcccactgccgaagccactacataaaccggctagaatagcggcgattaaaatatcgtggtttaaatcaattgtgatggggacacgttgccaaatccatagaaaaacggacatcatcgccgttccgtaaatcgtgtaggcgagtgcgcgtttaccgaggtaacgatagcctagaataattagcgggatatttaacaaagccgttgaatacgccgggtcgatatgcaaccaataccgtaaaatcaaggtaatcccggttaagccaccttcagccaggtgattttgaatgttgatggtcactagcccaaacgcgtagatcgcacagcccagcgcaatcaccgctaaatcacgactagtcgtttgccaagtatgttgtttcgtcatgtcaacgccccctttacataactcaaatatagcacggaatgggggttaaaaacagttggaaccactttggtggctgaagtggggtccttgattgtggtatgataaatagcatcagaaacagttaattgttagataagagggatagccatgaaagtaaccacctttgcgccggaatttgaagcggccctaccaatcttaaaacaaattgaagcggcgggttttgaagcctatttcgtcggcggcagtgtccgcgattatttattaggcttgccgattcacgacgttgatatcgcaacgtcggcgtatccagcagaagtgaagcaaatttttaaacgaacggtcgataccggaatccagcacgggactgtgatgattcttgatcatgggactggctatgaagtgaccacttttagaacggaaagtggctatcaagattttagacggcctgattcagtgacgtttgtgcggtcgttagacgaagatttacaacggcgggatttcacgattaatgcgcttgcgatgcgcgctgatggtgaaattattgatttattcgatggcctgaccgatctaaaagcgcaacaaatcagagcggtgggcaaagccgacgaacgtttccacgaagatgcactccgtatgatgcgtgccgtccgttttgaaagtcaactcggctttgcagttacaccagaaacacaaactgcgattgccaaacatgctgaactattaacgaaaattgcggtggaacgcattcatgtcgaatttgtgaagttgctacaagggattcagcggcaaaatgggttacaaacctttttaaaaaccgggttgtatcaatattgtccagcgttcgcgactgaagcagcggggctgaccaaattagcggcattaccagcgcaacagattcatgatgaagatacggcttggctactagtcaatgcattattgggtaaaacccccgccgccgccggcaaattattgaaacgctggaagagtgctaacgatgtgatcgatgcggttaaagcaggtttgggattattgccagccattctagaccaatcagccgatcagtgggccctttatcaagcggggcaacatgtattagacatcacgttaattgttgcccaattaatgaccaacgaatcagtcgcagttgatcagtggcaagcaaagtatgcggcactgcaaatcaagcaaaaggcggaactcgccatcaatggacaagtcttaatgcaaaatgggtatcaacctggtccgcaactaggaaaaatgttggcgcaactcgaaaaatccgtggtgttagatcaattaccaaacgatcaagcccaattattgcaatcggctgcacaaaactaagccattccctcagaaggtgtgttaaaataaccatgtaagcacattcagaaagggtgacaattgatgacacaacatgtttttaaggaattgaaattttattttagaaatggtgacgcttggaccgtcagccacaaagaattaaatgatatttggattagccgtgttaccaccagttatggccgcattaatggtggcccaatgcaagagattcacccttgcaagagtttcaaagccgaaatcttacctgaagcggatcatgtgaagtccgaagacatcaacaccggttctcttgaaatggggatgttcggtcgtgcaacgaagtatcaagacatcgaaaaactcgatttaatctttgaagatgatcaagatcgcgcaccaatgcaaatttatttcccattcaagaataaagataatagtggcttagataatatttatcaaagtagccaaatctcacaaaaaaatggtcggttgtacattgtgattgatgcagaacacacaattgcagatatgtaccctgaaatttaaacgttagctcctgacaatattgatcgttgtcaggggcttttttatttgtttacagtttacgacattctttttgtcattttgattgtcagtcgtctgattattcgctatgattgatggtaacgaaagtaaaaaggtgactatattgcaaacattgacagcaacgcatttaacgaagacttacggcgaaaaaacgctttttgaagacatttcatttttaatccgtgaaggggaccgcattggtttagtcggcattaatgggaccgggaaaacgacgttactcaacgcgattaccggcacggattcatacgatagcgggcaggttgaaacgcctaaccaatacgcgatgagttatttagcccagaaaccaagctttgatacgaacttaagtattatggcggcgatttttgccggcgataatccggttttcaagacgattcaaaactatgaacgcgtcttggcggcatatacgcaagatcccactaatccgaagttacagacgcaatacgaacaagctgatgcgcaaatgacgcaacaagatgcttggacggttgatacggatatcaagacgattttgacgcaattacatctaacggatttggatcaaccgattaatacattatctgggggccaacaaaaacgggttgggttggcacaagccttaattgaaagcccagacttattgattttggacgaaccaacgaaccacttggattttgattccattgaatggcttgaaaaacgcttagcacaatatcaaggcgcgcttttaattgtcacgcatgatcgctacttcttggatcgtgttgcgaaccaaatttttgaactcgacggtggtcaactctattcatataacggtaactatgaacaatttttaacccaaaaagctgatcgcttggaacgtgaacaacaagctgcccataagcaacaacaactctacaagcaagaattaacgtggatgcgcgcgggtgctaaggcacgaacaaccaagcaacaagcgcggattaatcgcttcaatgacttaaaggcgaatttaaccactggaccagacgattcggaagtcgatattcagatggggcaatcgcggttaggtaaaaaagtactcgaattaaagaacgccagtttaaaactcggcgatcgtcagattttggatgactttagtattctagttcaagcgaatgatcggattgggattagtggcgtcaacggggccggtaaatcatcactgttaaacgtgttggctgaacgcctcccacttgatagtggcgagttaattgtcggcgaaaccgtcaacctcggctactatacgcaacaaaatgaagacttagatcctaacaaacgagtgattgcatacttgcaagaagccggcgaagaagtcattggtaaaaatggggaccggatcagtgtcacacaattgttagaacaattcctattcagccgtcaaatgcacggcacattgattggcaaactttctggtggtgaaaaacgccgcttgtacttgttgaaaattttgatgcaacaaccaaacgtcttattactggatgaaccaactaacgatttagatattggcacgttgacgattctggaaaattacttggaaaactttaacgggactgtgatcacagtttcgcatgaccgttacttcctcgatcaagttgccgacaaactcttgatttttgaaggggccggcaagattagcaccgaagttggcctgttcagcgattacttggcaaaacaaaaagcaacaccaactaagtcagcgcctaaagcagcgacagcatcggttgaagaagcaccagttgcaaagaccaagcagaaattaacatacgccgaacaaaaggaatacgaacacatcgaagccgacatggaacaattggacgaacagattgaaaccatcaaagcagaaatgaacgcaaacggcgcggactatggtaaattagcagagtggcaggcccaaatggatcaacttaaccaacaactagacgaaaaaatgacccgctgggaatacttaagtgaatacgcaaactgagtgcgttcaaactggtcaggaggttctgagcatttacctagttaggcgaattagcgacgcagtcgatgatttggctaacgtagtaaagcgcaggaacctagtttgaaaagcacgttaaagaaaagaagtgcgttcaaaccggttatgttctgaggattagcctaacaaggcgaatgattgctggaagcaatcgtttgacttgtgtagctaaacgcaagaacatggtttgaaaagcacgttaaagaaaggaatccacatcatgtctgagcaaacctacttagatttagaacgtaccattttagaaacgggtcattataaagaagatcgtaccaacactggcacctatagtctgtttggctatcaaatgcgctttgatttaaacgaagggtttcctttattaaccaccaaaaaagtgccattcgggttaattaaaagtgagttattgtggtttttaaaaggtgattccaatattcgttacttactacaacacaataatcatatttgggatgaatgggcgtttgaacgttacgttcaaagtgccgattacacaggcccggatatgacagattttggtcatcgtgcccaaactgatgcggccttcaatactgtttatcgcgaccaaatgcaacagtttaacgaacggattttagacgatgaagcctttgccaaacaatatggtgaactgggcgatatctatggtaaacaatggcgtgcttggcaaacccgttctggggacacaatcgatcagattaaaaacgtgattgaacaaattaaaaccaatcccgattcacggcgcttaattgtctcagcttggaatccagaagacgtgccaagtatggtgttgccgccttgtcatacgatgttccagttctacgttaatgacggacggttatcgtgccaattgtatcaacgcagcggggatgttttccttggcgtaccatttaacattgcgagctacgcattattgacacatttgattgcgcatgaaaccggccttgaagtcggtgaattcatccatacgttgggtgatgcccatatttacagtaatcatattgaacaggtgaagacacagcttcaacgcccaattcatgccgcaccaaaattgtggctcaatccagataaaacaagcatctttgattttgatgtcgccgatattaaacttgaaaactatgaagcagaacccgcaattaaagcatccgttgcggtttaatgaggaggagcgccaatgttagcattcttatgggctgaagatcaaaatgggttaatcggtcaaaatggtcacttaccatggtcattacccaacgatcttgccaattttaaacacgaaacggttcatgaagtggtggtaatgggccggaaaacgtatgatagtttacccgtccaacccttacctggacgccaaaacattgtgattacgcgacaaccggatttagctgtggctgatggggtgtttgtgatgcacaccaaagcggaactgcttaaatatgagcaagccaacccgatgaaaaagatttttatcattggtggtgccgatatttttgcaatgtacgccgatgatgtcgattatctgtacgttacaaaaattgctgaatcgtttgaaggcaacgtttatatgccaaaattagcgatggatcagttcgaattgatcagtcaaacacctggtgtggtggacgaacgtaatcgctatgcgcatacgtttgaaatctatcaacgccgttagaaagattcaattaagggcggtcgcagcgatgtaaccgcctttttgcttgctacaaaagtgacaactggctttttttttaatcagtaacttttggtgaaaaaagcgtgattgtttgatatactgtcaatagacataatcatagaaatcacggggccgttgattgcccagatttcaagatagaaagcgtggctgaagtaatagtggctaatattaaaattgtaacggattcatccatccaactcactcctgaagaaattaaagaacatcatattacggttattccgttgacgattatgattgacaatacggtgtatatcgatggtgaaaccattacccgcgatcaatttatgactgaaatggcaagtgcgagtaccttacctaagacgagtcaacccgcaatcgggaattttgtcgaaacgtatgaacaattagcggctgatggcagccagattttatcaattcacatgctacgagcaattagtggcactgttgatacagcccgccaagccggcgagatggcgaaagcagatgtaacagttgtcgatagcgactttaccgaccgtgcaatggcattccaagtgttaaaagcggcagaagtcattgaaaacggcggtagcatggatgatgctttagcagccattcaaaacgtacacgatcatacgaagttatacatgggtgtgactgatctaaccaacctcgttaaggggggccggttgagtcatgcggctggtgtgatttcaagtttattaaatatcaaggtgatccttgaagtggctgatagcgaattaaaagtgttacgcaaaggccgggggatgaagaccattacgaaattcatcgatgaaatggaagctgatatgcgcgacttaaagattcgggcaatcgggatttcacatgcggatgggctagaattgagcgaaaaaattaaagcacaattgcaagtagtattcccaaacatcgaaattcttgtccggacaactgatccagtgattgcaacgcatgcgggtgcaggcgcatttgccgttatgtactacacagaggattaacaagattacaattaatgtattaacacactaaggctggttgacatttaattgtcccagccttaactattatctagaaataaccgaggtgtcacgtttgaagaaagcacgacagattttaattgatttaggcttatttgctggtgcgattttagtggtctttattatctggcaactattaacgccacggcccaaccaagcgcctaagacggtaacatcaacgtcttcagcggataaagtgatcaaatcaaaaccaaaaccaaaaaagacgttgcagttggttgcgattggcgattcattgacgcatggtgttggtgatgagaccaacaaagaaggctatgtgtcattagttgccaatcagattcagcaagcaaccaagcatcccgtcaagaccgccaatttcggtgtgacgggcgataccagtgtacagattactaaacgcgtgcagaaacaaaagccgctacagcagcaattggcaaaagctgatattgtgacgctaactgttgggggcaacgacctaatggcagttttacagaataatttttttgagctgaatcaacgtcggattacgactggtcagcaaaaatatcaagcgaatttaaccacgctgatgatgcaaattagaaaatataatcctgatgccccaattttcatcatgggggtctacaatccgttttatgtctatttccctgaaatcactgggatgtcaaaggcggttgctgagtggaatcagaccgccaaaacggttgctaatgatttcaaagatacgtattatgtcaatagtgatcggatgttgacacggggcgatgggcattttgtcaaacagactaaatcgctcgctaaaatggatagtgcacagttgcaaaaaacattagcggctaacgagcatttgaacccctataccagtccagatgatcatttccatcccaatcataaaggttatcaatgggtcacaaaggccttttggcaagtgatgaaagcacacaagcaaacgtgggattagagaaaggataggttatgacaaccagacaagcacatcaagcagcacagaaaacaacaactaaacggaccatcaattattggaaatacagtttcatcgtcttattagcagtcgtgatcgggacagttggtcttgtcggctacaacgtgacagcccctaagactgaaatgattaaaactgagaaaatcatcaaagctgatagcacttttgaaattcagatgcataagagacaaatcaatagtttagtcacctattatttacaaaactacttggaagattcaaagattaaataccaactcaccctggatcagcaggcgattttatctggtcaattcaagttcttagggtttccggtcgaattcaacctcttttttgaaccgtacgttttagaaaatggcgacgtccaattacgcgccaaacaattagcagtcggacaattgaaggtgcccatgtcgtttgtctttaattacatcaagcgtcaatacaaattccccaaatgggttattttggatgcacacaagagccggattacattacgcctaaatgagttcaagctcgaaaacgggatgcaagtaactgctaaacatatcgatttgaagaatgataagattgatttaaacgtctatatcccgctaaaaaataagaaataaggtgttcagatgaagcagagtttttatcgttacctcatgacccaacgtgatccgaataattatgaaccagttccccaatttgccaacaatgccttttttgaccaatctttccctaaacaaagcggcgattatgaaacattaacgcgctatttggaacttaatggcagctacctcccgagtatgacgatttttgatgaggcgtatgaagcctatcaggaaagcgaacaagcctaatgacttccccgaagcagaaattgtggcggggatgggccattaccggctattggcttctcgcatttttactggctgggacggtagcgattgtgttacggtcgttcattctggtccccgcatcggtgtcagggcaatcgatggccccgacgcttgagtcagcggaccaactcttattacgcactagtgggcccatcaagcgctttgatgttgttgtcttcacccgagctgatcaaacaacttatgtgaaacgggtgattggtctgccaggtgaaaccgttgcataccgcaatgaccagctgtacatcaatggacggcatgtcgacgaaccattcttgaatcaggccaaaaagaaaccagggattttaacatcagattttgaattaaaaaccttaatcggcgaaaaacagattccaaaagatgagtactttgtattgggtgacaatcgccagattagcaaagatagccgtttgtttggtacgatccaccgcgatacaatattaggccgagcagtggcggtctactggccgattaaagatatacaatctttaaaataataattaaaagctgacatactctagagtgtgtcagcttttttgattatcgagtgctaatgatcgtatgaaatgtactgaatatgatgcttaactgaaaaaatgatacgcttaattggtggatgttgtagtccggaattaaatttaacccgtcagccagacatcaggtatgatagaattaagaataatacaatcagtgacaaatattaagaatgatgtatatcgcttaactagcaataaaggagttattatgacaattcaatggtatccaggccatatggcaaaggcccaaaaacaaattaaagaacggctcaaagcagtcgatttgattctcgaaattgtggatgcacgggttccagaatcttccattaatccgatgattgcagaacttggtcaaaacaaaccgacgctcttgattatgaacaaagcggatatggcagatgccaaacgcacacaacaatggattgaaacatttaaaaaacgggggattacagcaatcgcgcttgatgcgcaacataaatcaaaattaccgcaaatcgaaaaagtagcacaagaaattttggcagacaaacttgctaaaaaacgggcaaaagggattcttaatccggtgatccgtgcaatgtgtgttggggttcctaacgttggtaaatcaacgattttgaatcgcttggtgcaaaaaaacattgcggtaacaggtaatcgacccggtgtaaccaagaatcaacaatggttaaaagcgggccaatcactcgaattgttagatacaccaggggttttatggcctaaattcgaagatccagctgtcggcaataagttggccttaactggtgcgatttcggatgcaatttatcacccggatgatgttgtggtgtatgccctcgattatttcaaggatttctatccgcaacaattggtaaaagaataccatgtgacgccggctgaacttgaaatgccagcgcctgatttaatcatggcattgaccaaacgactaggttttaaagaagactacgatcgcttctgtatgaaattcatcacggacgcgcgtaagggtaagttagggcgctttacactcgatatcgttcctgtggaggcgcactaatgaccaaaccagaatcaattgctgccattaaggcacgcttattagacgacatttcagaggaagaagtggcgctcttacgcagtgatgcgcgtgctggcgtgcagaagttactcgttcaatatgacaagcggatggctaagttagcggcgcaaaaagcggcgtttatcgaacgacgccagctagaagaaagtttatggccagattatcccttgattgctggaattgatgaagttgggcgcggcccattagcgggtccagttgtgacagcggccgtcattttgccacatgattttgacctatggcaagtcaacgactctaaacagctttcgtttaaggtgaaacaagaactgtatcgcggtatcatggcacaagccatcagtgtcagcattgggattgccgatgcaccacggatcgaccaagagaatatctatcacgctacggaactggcgatgggcgaagctgtcgctagtttagcagaacaccccgattacctattggtggacgcaatgaccgtgccgacagacatcccacaagaaaaattgattaagggggatgcgcgcagtattagtatcgcctcagccagtattgtggctaaagtgattcgggatcaattgatgattaattatgatcaacagtatccgggttacgatcttgctaataatatgggttacgggacagcgaaacatctcgctggtttagctgaattcggtgttacgccaattcaccgccgcagtttttcgcccgttaaagacgccctatagaaaataaaacagctcctttacgaagataaacgtaaaggagctgtttttttgtgttgactaaaaagcaattattattgaaagtacacctggcagatgggtttggccccatcagtgaattacgcttagccgcatggttagtaacgagtcacaattgggctttatcggcattggagattgcgcagattgcgtgtttaccggagcgatattggctgacctttcagactagttttgacagtctagctctgcaacagaagtgtgccacgcatgaacgttatgttcagtatctgacgattctagaagcagattatccgcaacggttgttagaaacccattgtccgccaacagttttattttatcgcggcgatttaagtgttttgaaacagccatgtgttgcggtggttggtgcgcggcaagccacggagtatactaagcaagccctgcagcatttattgggattaccacaaacaacgacgattatcagtggtttagctcaaggggcggatgcgatggcgcatgaagttgcactccaaaaagggttacgaccgattggcgtgattggaacgggcttgaattgttattacccaccacaaaacgaacacttgcaacaggcggtcgctgaaaaagggttattgatatcagaatacggtttggacgtaacggctaagaagcaccacttcccagcccgaaatcggattattgccggactttgtcatagtttagtggtcacagaagcccgccaaaaaagtggtagcttaatcaccgctaatttagcattacaagccaatcgtaacgtatatgccttaccgggccaggttaatcattcattatcggcaggctgtaatcaactgattttagccggtgcaacgccgcttttaaatcaacaattgttattggacgagttgcattattttgattgagggttaattgttgacaattctgcggcatgttgttaatattaaagtcacaagttacttataaagtaacaaatggaattcaaaggggatttttaatatgaaatatgcaattacagcagtgacaggtcgttttgggcaagtcgcaatgaagacgttggctgacttagtgccagcagaacaaatcattggattagcacggaatactgaaaaagccactaaaatggtcccagctggtgtgaccgttcgtcccggtgactataacgatgttgccacattaacggaatcactcaaaggcgttgaccggttattattcatctcctcacaacctggtggcgatgtgccccgtgcgcaacaacatttaaccgtgattgaagctgctaaaaaggctggcgttaagtggattgcttatacgagtttcccacacgctgatcaagcaacaggtgctttagcaagtgatcacattcaaactgaaaaagcattggcagcatcaggcattgatcatacattcttacgcaataactggtatcttgaaaacgaaatggatagcattaaaggcgcattagcaggtcaaccatttgtttatggcgctggtgaagggcatgttggttgggcactcgaacacgactatgctgaagctgcggctaaggtattagtcaacgatcaaccaaaagcgatttatgaatttgccggtgcgccagccacttatgcggatttagctcaagcgattagcgagttgactaatcaagaatttaaggtagtatcattagatgcggctgattatcgtcaaagcctcgaagacaacggcttacctgctgaagtcgctgaaattgtcactggtattcaaacaatgattcaagatggtgatttagatgaaaccatttctgatttacccgatgtcttaggccgaccattaccttcattaaaagaagcgttacagacgattattaaataagcctgaattgatttcaaaaaggcggttgaaccatgaaatattctcataaacttagtgatgccatccatattttggcctatgtcgatatttttcaagatggtgatttatcaagccaagcgattgctgggagcatcgagtctaatcctagtttagtgcggcggctaatgtcactactggtgaaggcggatttattagcgactaaaccggggacgattgcccctaaattagcgcgcccagcggaacagattacaatgttagccgtttttcaggcgcttgatacagatcaacggttattacacgttgatgaaaaaacaaatccagattgtttaattggtagcaacattcaagcaacccttgatgcggcttatgatcaggtgcaaaaagctgcggaagcggagatggcaaccgtcacccttgatcaaattattgcggggattcttgaacgcgatgcacaaaaaaatagtttgtcagtctaagttttttatctggcgactatataatagaagaaatcggggttcgaccaagtggttgaaccccgatttttggtgtgatttgtacgtttgaaaacaatttctctttggcatactgccaaacctatgctatgctttaagctgttaatatcaagcatactatcagttgacaatcgtcaaggtagtgttttatgctaatgaacgatttgaacaaagcgttctgttgaaaggggtttgtccatggcaggcaaaaatttagtcattgtagaatcacctgcaaaggccaaaacaattgaaaagtaccttgggcgcaactataaggttgttgcaagcaagggtcacatccgcgatttaccaaagagtcaaatgggtgttgattttgaaaataattatgaacctaaatatatctcgattcgcggtaaaggcgaaacgattaaagaattaaaaaagcaagctaaaaaagttgatcatatctatctcgcagccgatccggatcgcgaaggcgaagcgattgcatggcatgtttcccatattttaaaactcgatccaactgaaaaaaaccgggttgtctttaacgaaattaccaaagacaccgttaaaagtgcttttaaaaatccacgtagtatcgatatgaaactcgttgatgcacaacaagcgcgacgcgtgcttgatcggattgtcgggtattcaatcagtccattactctggcaaaaggttaaaaaaggcttgagtgctggtcgggttcaatccgttgcgttaaaactcgtgattgatcgtgaaaacgagattaaagcctttgttccagaagaatactggtcattggatgcggaatttaaaaagagtcgcagtaagtttaacgccagtttctacggcgtgaagggtaagaaattaccccttagcgataatgatgcggttcaagcgattttgaaacaaatcgataagactaaggatttcacgattgaagatgttaagaaacgggaacgcaaacgttttgcagccgcaccatttacaacgagttccttgcaacaagaagccaaccgtaagttgaacttcagaacgcggaaaacaatgatgcaagcccaacaattgtatgaagggattaaccttggtggcaaagaaggcacggtcgggttaatcacttatatgcgtaccgattcaacccggatttctaccggtgctaaacatgaagcgtcacaattcatccatgacaattatggtgaagaatatgcggcattaaaggcgcataagacgaagaatcctgaaggtgcacaagatgcccatgaagcgattcgcccaacgtcagtgatgcggacacctaagagcttgaaagacgttttaactaacgatcaatataaaatctataacttaatctggtcacggtttgtcgccagtcagatgacaccagccatttttgatacggtcgcagttaagattgctcaaggtgatgtcttattcaaggcaaacggctcacaaatgaagttcccaggattcacgaaactctatgtgtcatcacgtgatactgaagactctgctaaggataatgtcttaccagaacttgcagttggggatgcggtgaaactcgttagaactgatccagtgcaacattttacgcagccaccagcacgttattctgaagccaatttagttaaggctttggaagaaaacggtgttggtcgaccatcaacgtattcaccaacgatcgaaacgattcaacggcgttattacgtgaagttaaacgcaaaacgctttgaaccaactgagttaggggaaatcgtcaatggtttaattgtcgaattcttcccggacatcgttaacatcgactttacggccgatttggaacatcgtttggatgaagtcgaaacgggtaaagaagactgggtcaaggtgattgacaacttcttcaaaccgtttgaaaaagaagtcgaaaaagcgagtgaacaaatcgaaaaagtacaaattaaagatgaaccagctggctttgactgcgacatctgtggtgccccaatggttgttaaaatgggtcgttatggtaaattcttcgcttgcagtcgcttcccagattgtcgcaataccaaggcaatcgtgaaggaaatcggcgtcacctgtcccaaatgtggtaaggggcaagtcatcgaacgtaaatcgaagaagaatcgcttattctacggttgtgatcgttacccagattgtgattttatcacatgggataaacccgtcggcagaaactgtccgaagtgtgaacactaccttgttgaaaagaaaattaaaggtggcaaacaagtaatttgtccaaacggtgactacgaagaaaccgtccaaaaataattagaaaaatggagactagcaaatgagcacagaaccttttgtaaacgtgattggtgccggattagccggttcagaagcagcatggcaaattgcccaacgcggtgtgaatgtgcacctctatgaaatgcgtcccgttaaaatgacaccggcgcaccatacagaacaattcgcagaattagtgtgtacgaattcgctccgtgcgaaccaaattaccaatgcggttggcttaattaaagaagaaatgcgtcacttggactcattaatcatcagtgcggctgatcaaaatgccgttcctgctggtggcgcattggccgttgaccgcacaccgttttcacaaacggtgacggatcgcttagccaatcatgaacgtgtcacagttcatcatgaagaattaaccgattttccagaaggtcctacgattgtggccactggtccattaacgtccgaaggcttagctgaaaaaatcagtgccttaaacggcagtgatggcttgtatttctacgatgctgcagcgcccattttggataagaacagtatcgatttcgataaagtttacctcaaatcacggtatgataagggcgaagctgcttacttaaactgtccaatgactgaagaagaattcgaaaacttctacaaagccttgattagcgctgaagttgcagaaatgcatgactttgaagaagaaaagttctttgatggctgtatgccaatcgaagtgatggccaaacgcgggattaagacgatgttattcgggcctttgaaacccgttggattggaagatccgaatactggcaaacaaccatacgccgttgtgcaattgcgccaagacaatgcggctgctagtttgtacaacattgttggtttccaaacacatttgaagtggggcgaacaaaaacgggttttccgcatgattcctggtttggaaaatgctgaatttgtgcggtatggtgtgatgcatcgcaatactttcatgaaatcaccagatgttttattaccaacctatcaatcaaaacaacgtgacgatctattcttcgctggtcaaatgactggggttgaaggctacgttgaaagtgccgcttctggactagtggctgggattaacgccgctaaactggcgttggaccaaacaccggctgttttcccaacggatacggcgatgggatcaatggcgcactatattacccatacgagtgccaaacatttccaaccgatgaatgcgaactttgggattttcgaacctttgaaacaacggattcgcgataaaaaggaacggaaccaagcacttgctgatcgcgcacttgaaagtatcgaccaatttaagacgacactttaattagaatcttttaaatcccgccaggcttgtggtaaagtaatactaatcaagcttggagggatttttttggcgttagaacaagaatggcttaatctttttttacagtacttagtggtcgatcggcattactcgccagaaacccaaaaagcttatcaagctgatattcagatgttcagtgcttttttaaccgctaacggcggcttagcgtcgtttaaacaggtcacgccactggacgtgcagacttacttgaatgaaatggatcaaaaagaatatagtcgtgaaactgtcgcgcggcgaatttcgagtttgcggtcgttttaccggtatttagtgaaaaatgagttcgtgcaaaccgatccttttgaagctgttcaattaaaaaagcaacagcataagctgccgcggtttttttacgaaaaggaaatggacgcgctatttgctgccattgatggggatcaaccactcgatcaacggaatcgcgccatcttagaattactgtatgcgacggggatgcgggtgagtgagtgcgcgcagttgacggtagcacaaattgatttcggcttacgcgtcattcttgttcatggaaagggcaataaagatcgctatgtaccattcgggcaccatgctgaacgtgccttgcaagcttatttaaaagttggtcgtgttcaattgatggccaaaaaacaattggaccacgatgtcgtttttgttaatcatctcggagcgccaattacaagtcggggaattgaatacattttagatcagattatcaagaaaacaagtttaacgagtgacattcatccgcatatgattcggcatacctttgcaactcacttattggatcacggtgctgatctgcgaacggtgcaggaattattaggccacagtagtttatcaaccacacagatttacacccatgtcaccacagcccatttacaaaaagattaccgccaattctttccccgcgcgtaaaactcggactaaagtttgatttttttcaacgaaaaatagactaatattagcacacagtcttaaagactgctaaaatagaagtgcgttcaaaccggttatgttctgagaattagcctaacaaggcgaatgattactggaagcaattgtttgacttgtgtagctaaacgcaagaacatggtttgaaaagcacgttaagaaagaagtgcgtcatcaacgggttgtttttgagcatttgcctaatcaggcggattaccggcaacgccggtgatatgacagatgtagcaaagcgtagaaagcagttgatgaaagcacgttaagaaaaaagtaagtgcgttcaagcttgttcaacttttgagcactagcacagggaagcgaattagcgataaagtcgctgatttgattcacagcgctaagcgcagaaagttagtttgaaaagcacgttaagccccgcccaatccccaaacaacgttaggagtaattcatatgacaacaatttgtgcagttaaacataatggtaaaacagctatcgccggtgacggtcaagtcaccatgggcgaaaaatttgtgacgaaggattctgctaaaaaggtccgtcgaatttatggtaatcaagtcgcaatcggctttgctggtggtgttgcagatgcctttacgctacaagaatggtttgaacaaaaattagaaaagtattcaggcgacctgcaacatgctgctgttgctttagcgcaagactggcgtaaagatccaacgcttcaaaaattagaagcgatgttgattgcggtcaatgcaactgatattttattaatttcagggaatggtgaagtcatcacccctgatacgctatcggaatcaggtgatcaagtgattgccgtgggttcaggcggcaatttcgcccaagcagcagctaccgcattattacttgaaggaaaagatgacttatccgttgaaaaaatcgtcacaaccagtgttgatattgctggtggaatcgatgtttacaccaaccacaacgtgattgtcgaatcattttaggaggtcgcacaatggacttaatgaataaaacacccaaaacaatcgttgccgaacttgatcaatttgtcattggccaagatcaagctaaaaaagccgttgcggttgcactatacaaccgttatcgccggatgcaactcagtgcaaaaatgcaacaagaaatcacgcctaaaaatctattaatgatcgggccaactggggtcgggaaaacagaaattgcccgacggttagcgaaagttgtcgatgccccatttatcaaggttgaagccactaaatttaccgaagtggggtatgtgggacgtgacgttgaatcaatggtccgcgacttagctgatgtggctgtgcatatggaagaaacagaacaatttaaaaacgttcgtgctaaggctgctcgtcaagcagacaagcgcttggttaaactactagtaccgggcattaaaaaggaacaacgtaagaacaataacaacatgaatgatttaatgaacatgtttaacgcgcttcaaaaaggggaaacaccagctggtttcggacaaactgaatcagaagaagtgacggatgatatccgtaacgaacggttatctgttaaagaacagttagataaaggcttgttagatgaccgggaaatcgaaattcaagttgatgaaccgaaaaaagttgccccaatgaacgatatgatgggccagatgggaattgatttaaacgatactctgggttcaattatgccgaagaaaaaaattacgcggacggtaacggttaaagaagcgcgtgaagttttcattcaagaagaatccgctaaattagtcaaccatgccgatatttaccatgatgcgctccaacgtgctgaaaataccgggattatttttatcgatgaaattgataaaattacggctggtggcaaaaaacaatctggtgaagtctctcgtgaaggggttcaacgtgatattttaccaatcgttgaaggctcacaagtcaatacgaaatacggtgttttgaagaccgaccatatcttatttatcggttcaggggcgtttgctgaatcaaaacccagcgatttaatcgctgaattacaaggacggttcccaatccgggttgaacttgaagatttaactgaaaaagacttcatccgaattttaacggaaccaaacaacgcacttgtaaaacaatacatggcgttgattggcgccgatggggtgcacgtcaccttcacgatggaagcaattggccgcattgctgcgattgccttccaagttaaccatgataccgataatattggtgcgcgtcgtttggccaccatcttagagaagctattagaggatattctctttgaaggtcctgacatgcagatgggggatatcaccatcacagaacaatatgtcaacgataagatcggtaatattgcagccgataaagatttaacccgctttattctataatttttaaaaggtggtattttaagatgatccaaattgcaaacgaatttttaacggtgaccctcagtccaaaaggcgccgaattacaaagtattaagggcgccgtttcggggcttgaatatttatggcaagctgatcccgatgtttggggccggcacgcacccgttttattcccattcgtggggcgttcaaaagcagaccaatatacgtataatggccaaacctatccgatgggtcaacacggttttgcacgtgatcgcgaattcagtatcgaagaacaatcggaccacgccgtgactttcttgttgaaagcagacgctgacagccgggccgtgtatccatttgaatttgaattacgtgtgagctatcgtgttcatgatatgcatttgacggttggctatgacgtccgcaatgttgcgccaagcgggccaatgtacttctcaattgggggtcatccaggatttaaagtcccattaacggatgacacgcaatttgaagattatttcttagactaccgcccacaaaaatcacgggttaagatcccattgcaaggggccttcattaatttgaacgaccggacgttagcaccaaccgacgtcgcaacggatatcaatcaccaattatttaaaaatgacgccttaatctacgaattaaagggtcaagccaatgaattcagtattcgttctgaaaaaacggaccactcagtgaccatgaaattggctggcgccccattcattggtgtttggtcaccttatccaacagaaggcaaccttgtgtgccttgaaccttggtgggggattgcggataccgttgacgcaagcggtgaactttcagaaaaatttggtgtcaacgaactggctgcaggtgaaacgtttaatgcaagttatgaaattactgttcgttaatgaatgattaaaaaaacgcacttaccaagatggtgagtgcgtttttttagtaaactggctgtaggcgggtaacgcattctaaacgcactctgctagtttttccagtagttccatgctaagatataagttataaaatcataggttaggtagggtaagtcatgactgaagaaaagaagtattacggcgcggatgccatcatcgatagtttagtaaatcatgatgttgagtacgtgttcgggattccgggtgcgaagattgatcgggtttttgaacgactagaacatcccgttaatccaaagacgcccaaattaattttgacgcgccatgaacaaaatgcagccttcatggcggctgggattggtcggattacgggcaaaccaggcgttgtaatggcgacttcaggccctggtgccagtaatttagcgacgggggtcgtgacagcaacggcagaaggtgatccagtcttagccattgccggtcaagtgaaacgcgctgatttgttgcgactaacgcatcaaagcatgcgtaatgccgctttattcgcaccaatcacaaaattcagtgcggaagtccaagaacctgagaatttatcagaagtgattgctaacgcctatcaagaagctgaatccgctaaacagggcgcaacgtttgtcagcatcccacaagatgtcacggactcagaagttcattctaaagtgattaaaccgctaatggcgcctaaattagggccagccagtcccgttgaaacgacgcttttggcacaacggattaaagaagcaaaattaccagtacttttagttggtatgcgcgcttcttcaccagaagtgacagcagcgattcgcaatttagtggctgaaacccacattccggtcgttgaaacgttccaagcagccggtgtcatttcgcgtgatttagagactgatttttatgggcgagttggtttattccggaatcaaccaggcgaccgcattctaaaacgcagtgatcttgttattgcagtcggctatgatccaatcgaatatgaaccgcgtaactggaacgctgaaagtgatgcgcacattatggtgattgatgatatgcgcactgaaatcgatcataatttccaacctgaaaaagaattggtcggcgatattgcgcagaccctagactttttattaccttatatgaaggggtatcaactagcgggcgatgtgcgtgattatttagttgaattgcacgcagaactcaatcaacgtgacacggcacctgaaatgacgaccgataatccacttagtcatccgttgaacattatttcagaactgcaagcacgggtcaccgacgaaatgaccgtcacggtcgatgttggtagtcattacatctggatggcgcggcattttagaagttacgaaccacggcacttgctctttagtaacgggatgcagaccttaggtgtggcattgccatgggcgatcagtgctgctctagtgcggccaaatacacaaattgtgtcggtttcgggagatggtggcttcttattctcaggtcaagacttagaaactgcggtgcgtctgaacttaaacatcgtgcatattatttggaatgacggttattatgacatggtaaaattccaagaagaaatgaaatatggcgaatcagcggccgttaagtttggtcccgttgattttgtccaatatgcagagagttttggtgcaaccgggttacgggtcgaaaaagccgcagatcttggtaaagtattggatcaagcctttgccattgatggtcccgtccttgtagatgtgcccgttgattacaaagataatcaattattaggccaagcattattacctgaccaactcgtttaatttgaggaggaaaatcaatgacaaatgatgtcaaacgcgtttatcaacacggaacgttagccctattaattccggggctctttacagggacaatgaccgttgctgaattattaacccatgggaattttggaatcgggacggcgcacggtttagctggcgaactggtcttattagatggccatgcttatactgtgaatggggatggccaagtgactgaactcgcacctgatgcgacagttccatttgcgacagtgcattggcaagattcatcattacctacacaagcggttcatcaacgcacaaaggctgagttagaaacgcaaattctagcgcaagcaccgttaaaaaacttgttttttgcggttaaaatgactgggactttcaaagtcatgcatacgcgggccgtccaaacacaacaggaaccttatccgaatttgactgctgcaacccgagtgcaaccggagtttgaacaaacagacgtaacgggcacgttgattgggtattatgcaccagcgctttatcaaggcgcagctgttgcaggctatcacgtacacttcttaaacgatacgcacgactttggcggtcatattctagactataccgtggtcgatgctcaaatgacgctccaaccgtttgaaacgtttgaacagcacttcccaagtgataacgaagcttttttaaagagtgactttgacttacaacaagtcaatgccgatattgaagaagcagaacactaaacattcaaaaagcccacggaaaaatccgtgggcttttttgtattttaagcatggtggttaattggaccgtacttgtggccgacttcaatcgggttagcgatggcgcggtgaacaaattgtttagcggtcttaatggcagcctcaattgtctgtcccttagcgatttcagcacagatgcaagctgaaagtgaatcgcccgtcccattaatatgggtggtttcaacgtaaggttctgatagccaaaattcttgtccatcggcaaggcaaacgtagtctgtaacgattgattgtccggcctcgtgatggcctttaatcatgacgttttttgcgtccattgccaatagtgcttggccagcagcttggaaatcagcaggtgtcttcagttcaataccagttaatttttgcgcttcgtagaaattaggcgttaggacagttgcaaggggcattaattctgtctttagtgtgttaaaagcatcatctgccaacaacaatgcttcatgcttggtaataatgaccggatctaacactaggggaccaaagtcatgttttttcaactgattagcaacggttagaatggtctcacggtcggttaacattcctgttttgcaagcgcgaacctgaaagtcggctgcaattgcttcaaactcggcatcaataaagtcgggagacagtgcttggctagcacgaatcccatatgaatttccagcaacacaggctgtcaaaatgctcataccataaacattacgggcaaaaaaagtatttaaatctgcttgtgcaccggcactgccatcagaatcggaaccggcaattgtcatgacttgcggaaagctatttaacattatcaacatctcttttccagagcggacggaacgtccatcacttaatatatcctaatattagtataagcttttaggtgtccttttttcaatcagcagaagacactaattaagtgaatttcgtgtatactatgaattaaataattgtcaggagggacttatgattcaattaaaaatcgaacgattatcttatcaggttgatcaacaagtgattttaaccgacattaatttaaccgttgaaaaaggcagttacttaacgattacaggaccttctgggggtggtaagagtaccttgttacggttaattgcggacttactaacgccgacaagtggcaccattttattaaatgatcagccactgacccagtttagtcccaatcagtatcgacaaaaggtttcgtattgttttcaacaagcaacgttatttggtgaaacaatcggggataatttacgttttccatacgagattcgtaatttaccggtcgatatggcaacaattgaaaaagcgttggcagcggttgggttagccaacatgccactaacgaaaaaaattaccacgttatcgggcggtgaaaagcaacgaattgccttgattcgtaatgttttatttccaccggaagttttattacttgatgaaattacgactggtttagatgccgctaataaggcaattgtattggcgtttgtccagcacctcaatgaggattgcgggctcacaattattgccattacccacgatacagaagaattacaacggaaagggcgccaggtgcaaattgttgctggcgaattggtaaatcaagatgaacttagccgttaatggtctttcactgacgtttgctgtgacattagtgtttgtcgcattagtcattagcttccatgaaaaaatcggtcttgaaaaagatatgattatcagtgtttttcgcgcaatcattcaattatttatcgttggttatttactgaaattcatttttcatattaacgatgtgtggctaacgttattgatgatgctgatcattatttttaacgccgcagcaaatgccaaaaagcgggcggggaaactacgcaacgggtttccaatttcatttatcgcaattttaacaagtactggggtcacgttaggattacttgttttatctggggcgattaagtttattccatcgcaaattattccaattactgggatgattgcttccaactcgatggtcgccattggcttgagttaccgcagcttactggcgcaatttaaggatgaacggcaacctgttttggaacgactcgccttgggagcgaccgctaaacaagcatcaattgccattattcgtgagagtattcgtacggggatgtcacccacgatcgattccgctaaaacgatggggcttgtcagcctgccagggatgatgtcgggcctgatttttgccggaattgatccagtcaaggccattatgtaccagatattagtgacctttatgttattatcggcaacgagtcttggttcagtgattgcgtgttacttagcttatcgatcattttacaatgaacgggaacaattgattgatctttaactgattgcacaaaaaaacgcccgttcggcgtttttttagttattgatgtttttgtttatagcgatagtacaggccaaatggcactaagttttcagtgccatttttaatgcgttgtagattttcgcggtgccggtagaccaggaaaagtaagaccaaggtcgcaatcgaaccgagtagccaatcatgcgtgtaaaacgataaaatcgcaatcatcaatggaccgaggatgctagccatgctaaccatacttgtaatcaggatgacactgataaagatggtactggcaattacgaagaaaagtggattgtatgccagtaagatgcctgcgctggttgcaacggcttttccccccgtaaagtgtaaaaagatggagtaagcatgaccgacaacggccgctaagccgacgattaagaccaatgcatgattggggatgtgaaaaatcatcggtaggctagcagcaagtgtgccttttaaaatatcaagaaataaaacggctgtcccagcgattgggccgagcacgcgatacgagttagttgtgccgatattatggcttccagcatctcggggatctttgtgacagaaaacgcggccgataataacgcctgatgggaacgaaccgatcaggtacgcaagaataaagataagactaagtttcatgacaaaaactcctatttgtggcatttgtttcccctattttagcattttgacaagggaaaaggaatattgtatgttagaataggtgaatacgaacatacatttgtattggcaagaaattttaaatttttgattgtaaaatcatccaaacttgttgataatataccttatctgttcatttttaaacaaaggagtcatacttgaatgccaaatcaaaaacaagattataatgataattcgattcaggtcttagaaggtctagaagcagttcgaaaacggcctggcatgtacattggctcaactgacggtcgcggcttgcaccatttggtgtacgaaattgtcgataacgctgtcgatgaagccttggctggttttggttcagaaatcaacgtcgtaattggcgcggataatagtattagtgtccgtgatcatggtcgtgggatgccgactgggatgcaccaatctgggattcctacgattgaagttattttgacagtgcttcacgcaggtgggaaatttacccaaaacagttataaaacatccggcggtttgcatggggttggcgcgagtgtcgtcaatgccttatccgaatggttgaccgtccgcgttgtgcgtgatggtgttgcctacgaagaacgctttgaaaatgggggccacccggttggtaccttgaaaaaagttggcaaagctaaagaaccaaacggcacgttaattacgtttaagccagatgggacaatttttcaaacgactacttataactacaataccttagcagaacgattacgcgaatctgcctttttactcaaagatgtcaagattacgttgaccgatttacgcgctgagccagcacgtcaagatgtcttccattacccagaagggattcaatcatttgtcgattatttgaacgaagataaagatacgattggtaataagttatatttcgaaggcaccaaagaagacattgaagtcgaatttgcgggtcaatataacgatggctactccgaaaacatcatgtcatttgtgaataatgtccggacaggtgatggtgggacccatgaagctgggatgaaagccggcttaaccaaagcttttaacgattacgcccgcaaggtaaacttgctcaaagaacgggataaaaacatggaaggctccgacgtacgtgaaggtcttagtgccgtcttgtctgtccggattccagaagaactcttgcaatttgaagggcaaaccaagggtaagctaggctcgccacaagcgcggacagctgtcgatagtttggtttatgaacaaatgagctttttcttacttgaaaatggtgaatttgcgcaagccttagtgcgtaaatcattaaaagcacgcgaagcacgtgaagctgcgcgtaaagcacgtgaacaaagtcgaaatggtaagaaaaagaagaaatccgatggcttattatctgggaagctaacaccagcgcaatcgaaaaatgcggcgaagaatgaattgtacttggtcgaaggggattctgctgggggttctgctaagcaagggcgcgatcggaaattccaagcgattttgccattgcggggcaaagttttaaatacccaaaaagcgaaattacaagaaattctaaaaaatgaagaaatcaacacgatgatttacacgattggggccggagtcggggctgaattcaaacttgaagacagcaattacgataaagtcatcatcatgaccgatgcggataccgatggggcccatattcaaattttgttgttaaccttcttctaccgctatatgcggccgttaattgaagccggaaaagtctacattgccttgccaccattgtataagctccaaaaaggtgctggggcaaaaacgaagattgcctatgcttggactgatgatgaattgaaagtcgtcgctaaagaaatgggtaaaggctacagtcaacaacgtttcaaagggttgggtgaaatgaatgctgatcaactttgggataccacaatggatccaacgagtcggacgttaattcgggtgcggattgatgatgcagccttagctgaacgccgcgtcacaacgttgatgggcgataaagttgaaccacgtcggaagtggattgaagaaaacgttaagttcacaatggctgaagatggtagcatcttagatacaacgaatggtcaaccagcaccgacaacttcaagcgctgaagtggatttatttgaccaattagacgaatagaaaagtgagtgattaaatttggctgatgaagcacaaaaaattcaagagctaacgcttgaagaagtcatgggcgaccgctttggccgctattcaaaatacatcattcaagagcgggcgttaccagatattcgcgatgggttaaaacccgttcaacggcgaattttatacgcaatgtccatcgatgggaatacttatgataaagggttccggaagtcagcgaagtctgtcgggaatgtcatggggaatttccatccgcatggggatagttcaatttatgaagcgatggtccggttaagtcaggactggaaattacgtgaaccactgattgaaatgcatgggaataatgggtcaatggatggggatccaccagcagcaatgcggtatactgaggcacgcttaagtaagattgctggtgaaatgctcaaggacatcgataaaaagacggttgatttcgttttaaacttcgatgataccgctgaagaacccactgttttaccagctcggttcccaaacctcttagtgaatggggcaactgggatttcagctgggtacgcgactgaaattccgccacataatttaggtgaagtgactgatggcttggtctatctattggatcatcccgatgcaacgttagaaaaaatgatgaccttcatcaaaggacctgatttcccaactggtgggatcttacaaggggtcgatgggattaagaaagcctatgaaactggtcgcggtcgagttgtcgtccgggcaaaaaccagcatccaacaattacgcggcaatcgggaacaaatcgtgattagcgaaattccttatgaagtcaacaaggctatgatggtcaagaagattgatgaattacgcgttttaaagaaggtcgatgggattgctgaagtacgagatgaaagtgatcggatgggcttatcagtcgttgttgaattgaaaaagcaagcggatagtcaagggatcttgaattatctgttcaaaaatacggatctgcaaatcacatataactttaatatggtcgccatctcgcatatgcaacctaaacaggttggcttattagaaatcctccatgcctacttggaacatcaagaagaagtcgtgattcggcggacaaaatataccttacaaaaggcattggatcgtcagcacattgtcgcagggctaatcaaggcgctctcgattttagatcaagtgattgcgacgattcgtggtagcaagaataaaaaagacgctaaagataatttagtggcaagctacgccttcacagaagcccaagctgaagcgattgtttcactgcaattataccggttaacgaataccgatgtgactgctttggaacaagaatcagctgaacttgatgcagcgattaaggaataccggatgattcttggtgatccaaaagcacttgcacgggtgattaaggcgcagttaaaagcaatggtcaaaacttatcggagtgaccgaaaaactgaaattgaagcacaaattgagacgcttgaaattgatacaagtgtgactgttgttgacgaaaccgtcatggttgcagttagccatgacggctacttgaaacgtagtagtttgcgctcgtatcaagcatctgaaggggccgacagcggtttgaaagacggcgattttgccattttacaaaagccactacaaaccttagatcaattgatgatgttcaccaattacggacatttaattcaacgaccagttcatgaaattgctgatttgaaatggaaggaaatgggcgaacatatttcgcaatcgattggtttggcggctgatgaagcggttattgcagcatttgcctttaagccaaatgaacaggctggctattttgtgattgggacggatgatggctatattaaacaaactgccttctctgacctcttgccaagtcgaacatatcgttctaaggcacaagactttattaagttgcatgcagatgctcatgtgacaaacgtgaactggattccaagtgatgaagggctagccgtctttagtgctagctataaaggttatggattgagttttaccttatctgaagtctctgtatcaggtgctaaggccagtggggtcaaattaatggatctcaaagatggggatgttgtcaccggctttacgttatatcatccagaagataaacatgcagccgttgccattgtgacgcaacggggcgcctttaaacggatgctcttaagtgaggttggtttaacaagtcgtgcgcgtcgtggggtcttaattctccgtgaattgaagaaagaaccacatcgggtagcagcaatggttagtgttgagcaggcaagcgagttactgattcatactgatcagcaagaagtgattgcaattaacccttatcaacatgcaactgccgaccgttattcgaacggtagttttgtgatggatgttgatgaagttggacaaccggcatttgttcaaacgactattccagttaaaaatgaagacgagtcaaaataataaaaaagcaagtcatctatgtgatgacttgcttttttctgttatacataatatgcggattttttggttttgtactataacagcaaaataagttttgcacaatttaaatggtggggttataaaaatattttaagtagataaatagctataaatcaatctttcaaaagagtttaagagtttctaaacaatcaaaaagaaagggcttgcataaactatgtgatgtgttatactaaaattgtgaaaactgtgataaacaacacttgactaatggaggtaatccacatggtaaaaaccgaaaaaattaacttagccgactattgggacggctttaacaaaggtgactggcaagatgaaattgatattcgtgatttcatccaacaaaactttactgcctatgacggtgatgaaagtttcttagctggtccaaccgaagcaacaacaacgttaaatgatcaactaatggaattgaagaaacaagaacgtgaagcaggtggcgttttagccgcagacaatgataatcctgcaacagttacgtcacacggccctggttatttaaacaaggatcttgaaaagattgttggattacaaactgatgccccattaaaacgcgcattcatgccatttggtgggattcggatggccgaagatgccttggaagcatacggctttaagactgatccagaacaacacaagatttttaacgaataccgcaagacacataatcaaggtgtttttgatgcttatacaccagacatgcgtaaagcacgtcactacaagattattacgggccttccagatgcctatgcacgtggtcggattattcctgacttaccacggattgcagtctatgggattgatcgtttagctgaagaaaaagtccgtgactttaatggtgttggcgacggtgaaatgacagacgatgtcattcgtcttcgtgaagaaatcaatgaacaatatcgtgctttacaagatatgaagaaaatggctgctagctatggctttgatatttcaagacctgctaagaatgcccaagaagcaattcaatggatttacttcggttacttagccgctattaagacacaaaacggggctgcgatgtcagttggccggattgatacaacgatggatatctttatccaacgtgatttagagcggggcttaattacagaagctgaagcgcaagaaatggttgaccattttgtcatgaagttacggatggttcgtttcattcggacagaagattataattcattattctcaggtgatccaatctgggcaacattatcaatgtgtgggattggtatggatggtcgtcatcatgtcactaagactgccttccgtgtcttgaagacattggaaaatatgggtgctgctccagaacctaatatcaccttactttggtcagatcgcttaccagaaggtttcaagcgctatgcaacagaagtttcaattaagagttcaacgattcaatacgaaaacgatgatttgatgcgtaatgaatgggggagtgactattatgggattgcatgctgtgtttctgcacaaccaattgcagacggcgttcaatattttggtgcgcgtgctaacttggctaagacaatcctttacgcaattaacggcgggatcgatgaattaggcaaagctcaagtcggcccagcttatcaaccaattacaagtgaaatcattgattacaaagaattcatgggtaaatacgataagatgttagattggttagcagacgtttacgttaatgctttaaacaccatccactacatgcatgataagtattactatgaatcagcacaattggcattgaagaatagtcgtttagaccggacatttgcgactggtatttctggtctatcacatgcggttgattcaatctcagcgattaaatacggccaagttaaagttatccgtgatgaagacggtatggcagtcgatttcgaagcgcaaaatccagactatccacgttatgggaacaatgacgaccgcgctgacgatatcgctaaatggttagtgaagactttctatacgaagatgaatacgcatcatttatatcgtggctcaaaattatcaacatctgttttaacaatcacatcaaatgttgtgtatggtaagaatactgggacaacaccaaatggtcgtcaagctggcgaaccattctcaccaggtgctaacccagcatacggtgctgaaaagaacggtgctttagcatcattactttcaactgcgaagattccataccgttatgcaactgatgggatttcaaatacgtttggtgtcacaccaaatacattagggcatgatgatgaagcacgtaaagacgcgcttgtgaacatggtcgatggttacatgattaatcaagggatgcatttaaatatcaacgtcttcaataagcaaaccttaatggatgcacaacaacatccagaagaatacccaacattaacggttcgggtttcaggttattgtgtctacttcgctgatttaacgaaggaacaacaagacgacgttatctcaagaacgttctttgacgaaatgtaatctaacgaaagtggatagcaatatccgctttctggtaaggtcgttaacgcgaattaacgactttaccagaaagcatagcttttcttttaagaggtgaaagtgaaatggcaattaaatttacaacacggttatcaactgaaaatgttgttccagaaaccccgataacaccagaggtgccaattggatatgttcattcgattgaaacatttggttcagtggatggtcccggaattcggtttgtcgcctttctacaaggctgtcgcatgcgttgcgaattctgtcataatccagatacgtggaatattggtagcggagaagcttataccgcagacgaattaatcgcaaaggcactgccatataaggccttctggggtaaagatggcggaattacctgtagcggtggtgaatccttaattcaaattgattttttaattgatttatttaaaaagtgtaaggtacaagggattaatacctgtttggatacttgtgggcagccgtttacgtataaagaacccttctttagtaaattcaaagaattgatgaaatataccgatctttcaatggtcgatattaagcatattgatccagcggggcacaaaaagttaaccggcttttctaacgaacatattttagaaatgattgaatatatgtcaaatcatggtcatcatatgtggattcggcacgtcttgattccagaacggacggattacgatgagtatctcactcgtctaggggattatattcaaacgttaaacaatgttgaccgagtcgaagtgttgccctaccatacgatgggaatcgtgaaatacgaaaagatggggattaaatatccgttagcggggattgaaccaccgacccacgatcgcgttgtcaatgcggagcgtctattgcatacagcagactatccaaagcagcaacgctaacataagaaaattttaagcctttaataagaatgagcaacgaaaggggttgctctttttttatatctttattattataatgataggcgtaaactaaagaacggagatttgaaaatgaaaacaagacaagaaaatatcttctcctctaaaacattaacctatttcctacagttagcggaaacgatgaattatacccaagcggcacaactactcggtatcacgcaacctgctttaacccaacagattaaaaaattagaacggatagtcggggcgcctttattttattcagtcggcaagaagttacatatttcggatgctggtcggacgatgttggatgctacccatcagattcatgatttattaaatactgcgacggatgaaattcaaagttcaacgagtgcgacgcgcggtaagattaatattgggattttagcatcgatggaaatcagtgttatccaatccttcttaattcaatactataaacaatttcctgacatcgaagtcagcatgcacttattgactcggaaagaaatctgggaccgacttgaaaataataaaattgatattgccattatgtatttgccagatgacagcattaagaactggaaaccttataagtcacataagattgtggatgaacgcttactctttatcagccaagatcctgctttaaagacgcgtaagaagatccgttttaaagatacattagataataaatgggtgacatacccagatgaatactatttaaatcaattcatcagtgaagcctataagaatcaattggttgatcgtccagtgagtgcggctcaattcacatcaccatttgaaatcatgcgttttgctgaagcaactgaattaagtacagctttaccaaagagtttttatgaagcacataatttgggacttaagggaaacgcggttcaatttgatccggccattcagttcgaattagcttttgtcttccgcaaggaaaaggaagatattccacggattaatagctttttccgtgaattcgaccattatttagaagaaaaagattatttaacacggattagagagcaaaaccgtagaatcgtctaatatttttggtataattaggatgttatttttttaaaaggaaggtctgtataaatatgagtaaagaattagtattcggtcaccaaaacccagatacagacgcaattgttgcggcaatggcgtttgcttatcttcaacaacaactaggaaacgacgtagaagccgttgcgctaggtgaacctaatgaagaaacaagctatgcattgcgtcattttgcagcagcaacccctcgcatcattaaagaagcaagcagtgaagttgacagtgtgatgttggttgatcataacgaaagccaacaaagtgttgccgatatcaaagatttaacagtgacgcacgttgttgatcatcatcgaattgcaaacttcgaaacagtcagcccattattctaccgcgctgaaccagttggctgtaccagcacaattttattatcaatgttcaacgaaaacaaagttgaaattccagctcaattagctggtttaatgatgagtgctatcatttcagatacgttgttgatgaaatcacctacaacaactgaaaaagatcggattgcgattaagacattggctgaaattgctgatattgatttcgaatcatatggtcttgaaatgttaaaagcgggcactaacttagatgataagagcgaagctgaattaattgaagcggatgctaaaacattcgatatggctggtaaaaaagtgcgtatcgatcaagtgaatacagttgatatcgaagcggtcttcaaacgccaagctgcttttgaagctgctatcgaagcagacaacaaagctaatggttacgacttattcgtacttttgattactgacatcttaaacagtaactcagaagcgcttgttatcggtgaaccagcagaagcctttgaaaaagctttcaacgtaaaattgaacaaccatcgtgcacaattagccggtgttgtttcacgtaagaaacaagtggttccacaattaacagaagcattttaataacgattaataataaagtccttcggggctttatttttttattaggaggataggtaaatgaccgaggaaagcattgatgcaattcaagtgattgaagcgaccattcgaaattgccaaaagagtcagctgaagtttgtagcgggttcggctcaatttactttattaaaaaataggctttacgcattagaagttggtcgtgatttattgaacgggcacacagacataacagtcgaagccttagtcgaggcacaagccccgattgaatcgattattcataaaactgaaaaagcactctctaatcaaaaaaaacatcacccgtgataaaacgaatgactctattattagcagcgatgactgccgtgcagactgctattataaaccaactatctgcaaaaaagccccctcattaatttggggggctttttttgtgtgccatcagattggaattattctaatctaactaaaaatgtgttataatgtaaatgaattcacaagaaggagcgattgacgatgaaacataccatcaagtttgccttaacaattagtgtgggtgtgattgcgctatgcttggcgtttttgctacatgagccattgtgggcacagattttagtgagtttagcggggagcttagtagcgctctcgatgtttattgagatgattaaaacgctaaaatctggtcaatacggggtggatctattagcgattaccgctattattgcgacgttagcggtcggtgaatattgggcagcactaatggtcttggtcatgttaactggtggcgactcattggaagactatgcagcgcataaagcaggccgtgagttaaagacattacttgataattctccgcaaacagcgcatcgccttgttaatgatgcggtcgaagatgtttcagtcgataagcttcaagttggtgatcaagtgattattaaacctggcgaattggtccctgttgatgggcatattattgcaggaagtgctttattcgatgaatcatcgttaacgggtgaatcacgccccgttgaaaaagcactaaataatgagctcatgtcaggctctgtgaacggcgatacgtcggttaccatgcaagttgaccaattagccgttaatagccaatatcaagcaattgtacggcttgtagagacctctgcggcacaaccagcgcattttgtgcgcttagctgatcgatatgccgtgccatttacattagttgcgtatgtgattgctggagtagcttggtggttatctaaggatccagtacggtttgcagaagtgcttgtcgtggcttcgccgtgcccattaatattggcagcgcctatcgcgttaatctcagggatgagtcgtgctagtcgaaacgggattattgtcaaggctggcacaacaattgaaaaattagcgtctgctaaatcagcagcgtttgataaaactggaacaattacgaatggtcaattgacggttgaccaagttgtgccagtgattggtatcgcaccaaccgatttattgcaattggcggctagtgcggagcaagaatcttcgcatattttagcacggtcacttgttaaagcggcacaggtagaacaattacaaccaattgaaacattaaaagaagcaacgggcgctggggtagttgcgacgctgtcgtctggacaaacggttcgtgttgggaaacatcaattcgtgacgccagatgcgcaacagcctctgcaagaacaaaccactgtttacgttgcgatcaatgatcaatatgcggggtacattacgtttatcgatcatttacgaccagaagcaccggccacgatgcagacgctccatcaactggggattacgcgtttgatgatgttgacaggcgatcaagcgacaactgcgcaccagattgcggaacaagtcggaattgatgacgtccatgcaggctgtctgccagtcgataagattcatttaattgaacaagtaccgcaagaccaacgcccactaattatggttggtgatggggtcaacgatgcaccgtcactggcaagtgctgatgtcgggattgcgatgggggcccatggcgcaacagccgcaagtgaatcagcggatgtggtgattctaaaagatgatttaggacgggttagtcgtgccgttcaaatcgcgcgtgacacgatgcgcgttgctcgccaggcggttttgattgggattgcaatctgtattgggttaatgttgattgccagcaccgggattgttccagcattagtgggggctttattccaagaggttgtcgatacagtttcaatcttatatgcattacgagctagaacggatcgttaagggaattaaaaagagccgtattaacaccattcaagtgttaatacggctctttttttgtttatttttcagattgtacgtgtaaaaccatgtcttttggtaaatataacttaggcaccatggctaaacaaatacatagaacgatgccggttagaatgaagctagcgataaagctgccaccgttaacagtgagcgagtatagccaagcattcatacctttgggagcgtatgagccccaataaacggcaccggctaagaagtggcagaagtattttgcaaaagtaccaaaaaatgcggccatccataaaagggtcatcgttttgacttttgtatgattttgaatacttgcttgaataggtcgttgtaagatacctgctaaaccaacaaccatgaaggcaatggtaaattctagcaatccttgccatacgttcaagacactaccgtttcctaatccacgtaagattaagtctagtagaccccagattaagccggagaccattccaggaatggcaccacggcgtaaactgtagattacaatagggataatcccaaaggagacttcgattgcggaaggccccactgtatgggggatgtattccaatgccacggcaaatgccgcgatgattgccccttcaatctgaatcaatagacgctgatgttgcataaaaataaccccttttcttgttcaaccaacacaaaaaaggagttatcatttcaactccatcacaattcctacgcttgtcttaacaaacaggttcgaagggtctgattaaaatcactctcagccaatggctcccctttgcgatggttaacatttaatttttaggaacgctttcagtatactcgatagctggtataagtcaagcaatgtgtaaatcgacgaattgatgtaaaccaaatgactgttagaacgacattgataatcgttgccaagaagagcactaatagtggctattcaagctggtccattgccgagcgttgttcatcagcaacgacgtgcgtatataagtgagtagcttgcgtggtcgtttggcctagttgggtcgcaacaattgtttcactatgagttgccgccatgagatcagtggcaagtgtatggcggaacttgtgtggtgtgagacgcacgccaaatgcttcagaatacttcgcgactaacttttcaatggcatagttgctcatacgcttggcgctgccacgatagcgactgacaaataaggcttgttcattatcttcttttagatagcgtgatttacgaatctggcagtaatcccttaaaaaaggtaaactccacggagcaattgggacagtatcttgctgtccgcctttacggatcacggtaattgtaagttgttcaagattcaaatcgttgatgttggcttgggccaactctgatagtcggatgcccgttgccagcgccagtacacagatggcaatatcgcgttcgcaattttgcttgtatgatgccagttggcgattagaaagcaagttagggtaatcaacttgcatgaaggtgatgaagtcgtgtttcttttcaccggtcagcagttgtttgctgatgtgtcgtgaacgtgtcgccattgtttctgaagctttaagtagtttcaccttcttcatgacgtttcggtaaaaataaggctcaccatcagcttgttcggcttcaatggttaagaagtaccagagcgcatttaatgcgttaatcgagcggttaacggcttgaaaggagagcttatggttattttgtttacgcttattcattagaaaaatcttgtagagctcaatatcttcgagtttcattttttcgagtgcggtcagtggcatctggtcgatagaggggaccacgacgatctgttcatcaactaaccaggtgaaaaagcgaacgtattcttgtaagtattgatagagcgttgcagaagagtaggcgtttgcctggcggttaatgtagaatttacgaatgtaatccggaagattggcgagttgcttttcgcagagttctaagtaacgttgttgatccatgatggaagactccttaattagcagtttaaagatagtttagcaaaaatgaggtgagaatactacaagtgttgttaaaaccataattttaacaacacttgtattgcaaaccgttccgctgtattgcaaaccgttccgctgtattgcaaaccgttccgcgaactgatgatcagatggtcttattcgactatctgcacagcaacctaaagatccttattccgtttaaaagctggtatatcaacgtttaaggccttttttaacgatttgatatgtgagttttaaggctaagatgtgttaatatgcgtatttaccaattaaaatctggcataatcgtcagattaatcacggatttgtgcctgagcttagatgaattctgcatttaaagttaagtttggcgatatcggttggccagtcagtttgattcatcatattggcgttgagtaacttgtaatagtttatgaatcgtgcagtgtaaaaaacaaacgcgttaagtgcggttcatcaaatcaattgaatgatgttggataataagtggttattttagcgctctttcaagggataagcgtttcttcgcataatatatattatgtaaactaaaatagatttaaaaaattaactaagcctacccactcgtcaccagcgtttaagcgcagcaaaaaagcgccatattaaaatgacgcttctgtaattagtgatttaaaaactgagccaacaaagctgcaaagtcatttggattttggaataacgccatatgaccagcatctgggtaaagttttaattgggaatttaaaatccgttcatgtaattcatatgaaccattaacaggtaccattcgatcgtgatcgccgttgacaatcaatgttggttggttaatttgtgccaggtttgccggttgatcgtgcgcatactgtttaattgctattaattgacgacgataagtggctaacgtaatggctttatcttcaacaatttcacgctgttttaaccggttaatgaacgctttaccagcctgtttgccttggggcgttctggtgaagaagaggtattccttaacgtctctatgcgttaagaaggaccgaattaagtcaaaagttgttatgcgccccactttggcgatttctgagtcaccctggggacctgttccgactaaaattaagtgattaacgcttgaggggtattttaaagtgaaggcctgtgcaataaaaccacccatcgataatccaagtaaatcgaattgagtgagctgcatagctgttataaaagcataacaatcagctaccatttgctcaatcgtcgtggggactttgccatccgagaaaccaacaccacgattattaaagacaatcacgcgtcgttgctgactgatcaggtcaattaatgcagggtcccagttatctaaagtggctgataagtgattcaataaaacaagtggtaagccgcgaccggtacccacttcgcggtaagcaaaccgttggccttgttgatcttgaataaattggttgggggttgttagataagtcatcttgattagcccgcttgaaccttaatcaccactttatcagttggatggccgtgagcaacaagttctagtgcctctttaacgtgtgctaaatcgaattgatgcggatcgatggctggtacaatcgcttgttgttcaacaatttcagtgatttttttgagttgggcaccatctgaacgaacgaaaataaagcgatattcaacgcacgcttttttagcgaggcgatcccatttccgcccggccaacgagaataagagttgcttccaaaatggtaattgcaattgtttagcgaattgtttgtttggaccggcaatcaagcttaaaatccgcccgcccggcttcataatcgccatttcacgttcaatatctgctccaccgcgtgtatcaatcacgtaatcgatttgatctaaaacttcccagtaatcggttgttttgtaatcgatatattggtcagcacccaaattcaaaatgtgatctcgcgcggctgcattgcctgaaacaatcacggttaagcctagtgattttgcgattgggacggctattggaccgaaaccgcctgaaccaccagggataaacagcgttcggttcggttgggctgccaattcctcaaatagcccctgataagccgttaagccagtcagtgggattgcaacggcttcacgtagcgataaatcctttggcgtgtaccagattgcatcggtggtaaccgcgacatattcagcaaagccaccgattttagccaatggtaaacgcgcatagacttgatccccgactttgaaatcagtgacgtctgttccaatcgctgtgatttcaccggcaatttcattgcctaaagtcagtggtaaagcatagttttgcattaatttagtatcgccgcggatattcattggatccaatggattcaccgctgcataggcgactttgacgagtacttcattggctagcggttgtgggcgatcaatttcttgaatcgtgacagctagtgtttgattatattttttaatttgagctgctttcatattagaaaacctctttccacgggagtgtttgtagggtttgttgcacaattgctgttagcgtagttgaatctgggttcactttagccatgacccggataccaatgagcgcactttgaagcgatgcagctaaaagatcaattgcaacagacggttctagttcggcctggccggcaatcagtaatgcctgcaacagtgctttttcttgggttaaataatgctgaatcagcgtttggatgtctggttctaatgaatttaacgttgccgcggtattcaccactaagcagccggctggttggttatccggatggtcaataaatatttcaaaaatggctgttaagcgcgaccttaaatcggtatgtgttgccagtacttgctcgaaacgctcgttaatttggtcacgataatgtgctagtacttggataaacagttcatgtttatcgccgaatgtatcgtaaatactgcgccggtgaatccccattgcatcaactaggttttgcattgaggtattctcatagccttgttgccaaaagacaagcatggctttgtctaagacaaccggtgcttcaaatgtttttgtccgcatctggatgctcctctcttattagaacgttcattctaatataaacgattctttgaaataacgcaactagattttgcgcaattttaaggggcaataaaaaagaacgcctcgaatgagacgttcttgtcagctgttattttgtccgatagaaaataccaaacgcccctaggccaacgtgactcataatgaccgggctggttagtgcgactgtataaggcacatggggctgtgtttcttcaagcgttgcttggatcttagcggatagttcatccgtgattccgacgtgtgagatgccgatttccgcaacgtcttgggtggctaagtattcacggatattgttgatttcttttgtaaaagcttttagtccccgcccctttgcgacgacttctaattccgtatctgttaagcgcacaattaccttaagtttaatgattttcgttaatagcccggccattctactaattcgaccaccgcgttgaagcgcgtcaagtgaatctaaaaagacgtaggtttcggttttacgacggatgtcatcgagatgcgcgataatatcatcaagaggcttccctgcttcaacgtcttgggcggcagcaaccacttgataagcaagtccacggtcgattgctttactatcaatcacgtgtacgtcacttgttgattggtgggctgctgtgtgtgccccttcgattgtgccacttaacaagccggtacaatgaatcgatagaatcgtactaccatcagcccctaattgatcatataaatcgacgaaactgccgacagttggctgacttgttgttggaaaatcggtcgttgcattttgtaagcgacttaaaaattcagcgcgggtaatggtttgtccatcaatgaaagactcatttccttgttgaatcgttaaggggacgatgtgaatgtcatatttggcgcgttcgtctgctgtcagttgaatcgatgagtccgttacaattttaattgtcatatgagttgtactccttcaagttaaatgttgaggtaaattgaaaaaaacatcagggtcgttccgagcattacgaaaaagtgccaaatcaaatgtaagccaggaattttaggaaaactataaattagagcgccaacggtaaagactacgccaccactgactaacagccaaaaaccaactggactgaggttgacataaagggtcttaccagctaataaacataaccaccccatcacaacgtaaatcgttgtttcaatcttttggtaccgaccgtggctcaaaatgtgcgttataataccggcaatcgctagtgtccagattgcaatcagtaagctaattcctgttgcatggccaataaaaatcaaacaatatggcgtgtaggtaccagcaatcagcaagaaaatattgctatggtcgaatatttgaaacacgcgcttggccttggtaaatgctaagcagtgaaataaagtcgaagcgagatacagtagcagtaatgtggcgccatacactgctagactagcaatcgcgactggtgagagtgttttatgaatgcttttgaccaggagcatgatgactaacgttaaactaccgaaaaaaccaatcccgtgggtaatggcattccatatttcataaatcagttgttgtcgtttaatcgtggaaagttgcatggttctcgcctctttttctctatttgccgagtattatagcgcgaatgtagattataagtcaatagataatagaattcgattctatgttagtgacaaatgataattgctatggcataataaatatactatcaacagattggtggcgttaatcagtatgcaatcacaagaatttgaaaaatggttgggtgactttcaacaattgcggttaccattatggtctgaatttccagatttagacctctatatggaccaagtcattagtgaggtcaataaacgactgagtcctttgttggacgttaaaataacgaaaacaatgattaatagctatgtcaaaatggcgattattgaacgaccggaaaagaaacgctataatcgggatcatttagccgaattgattgtggtcagtattatgaaattagtcttcccgctcgatgtcattaaacaagggatttcgcaatcgttggcaaacgacaccgctggtaaggcatatgatcagtttgtgcggttatttaatgccgaaattgcgaatattaacgcgcaatcaacggttaatgaattcaatttaaacgaggaaccgctcaacattgttcaaaaagtagccgttaaatccgttatttataagctaattgggacgaagttggttaccttagaagaacccatttctatcttataagtcacaaaaaaagcctgtcgaattgttcgacaggcttttaaattaggctttatcaaaatctttaatccaagcaagtgcaatggctttttcaccaagatgggtcccgataactgggccaaagtagctgatatcaattggtaagtctggatagtttgcttgaagcttatcacgccatgcaatcgctgctggttcatcgttagcgtgaatgattagtgcgcgtaatggatagtcaacacgttcggctgtttcagcaaaaatttgttcagcgcgggcgtaagccttcttcaatgaacgaaccttctcaaatgccgtaattttgttagtgtcagcgtcaaacgttaaaagcggtttaatcttcaacatgctaccaataaaagcagatgcgtttgataaacgaccaccacgcactaagttttgtaagtcgttaacaatgaaacattcatccattgtgctttttagatcgtcaaggcgtgcgataatctggtcgacggtcacttctgggtcgcgtgccattctggccgcttccattgctaagtagcccattaacatcacagtaatccctgaatcgtatgggacaacctggatgttatcgatggtgcttgccgcatttttcaatgtcgtgacaaacccagagatggtactagcaaggtggatgctgatgacagcatcatacccttcgttgccgaggtcttcgtatagttttaacatttcacccagtggtggttgtgatgtactggggaatgtttcggatgtttttaatttttgatagaactcttcagtggttatatcaacgccttcatcatagacctggccatcaaggataaccggaataggtacgacgaagagatgatggtctttcacttgctgttctgtgagataagcggtactatcagtgactacagcaattttcatggtgacacctacttttttattattcggtaataactatatcataaatggtaggttaattcccctaaaaatgccgattttccgaaaaatgtatagggcgtctcattttaatggtcgattaaagctttgataataacggttcagtaggatttttaaaagttgctgttcatcggtactccagttttgttgaatgtgattttcaagttcagtttgaagttgttgcaacgtacttaatgccgttttggcggtcggtgttaatgcgtaaacgcgttggcgcggatcagccccggtcacttttgttaacagcccttcttgagccatcgtatttaactgccgactgagtgtcgatgcatcgagtttggttaacgtggttaattctgcgtgcgaaatgcgttcttgatcgggttcaatggccattagaatattgacttgggctaacttcaagtcgagtcgtagcgcccagtgtttcttttgttcttgatacaatagattcagttgattaaacgttgctaaggttgagcgcacggtaaatccccctttaattgtataaagcaatttgataattgtattatacaatagtcgtgttagcgattgcaaacaactaatttctttgaggttccactgcaaaaccgttacaataagtaagacaattcaattatagagagtgtgagcaataatgacctttgatggtttaatgacccacgccgttgtaaatgagctaaatacaactttagcagacggcaaaattacgaaaattcaacaaccttatccaaacgaagtaatcttaacgattcgggcaaatcgtaagacctatccccttctcctatcagcccacccatcttatgcgcgagtgcaagtgacgcgggtgccttatgcaaaccccgcaacgccaccgaacttcgcgatgtctttacggaagtatttagatggcgccattttagaaaacatcaagcaaattgaaagtgatcggattctaagattcacatttaaatcacggaatgaactgggggacttacaacaactatgcttaatcgttgaattgatgggccgccatagtaatgtgattttgattaatcaagcgaccaataagattctcgatttaatccggcacgtcggtgtttcgcaaaaccgttatcggttcttaatgcctggtgccgattatgttagtccaccggctgcaaccggggttgatggttttacgactgatttaaagacgcttgattggttaagttattataacgaagctgctgatgaacaagtcaaatggttacaacaacacttccaagggatgagtcgtgaaagtgccgttgaactacaaacccgtttaatggatcatgacaattatttggcggttgtgactgatttcttcaagcaattcgaccaagtgacaccaacgttaacagttggtgaaaagaagtcgtggttcacggccttcccttatgagagcctgacagggacactgagccattttgacacgttgagtgagctgttagaccaatattacttacacaaggcgcagcgtgaccgagtgcagcaacaaggtagtgcgctcatccacttcatccgcaacgagattcaaaaggatgaaaagaaactgaaaaaactacaaaaaacgttaaaagcagccgacagtgctgatgattaccggattaagggtgaaattttgaccacctatttgcgggaagtcgaacgtggcatggctgaagtcacgttgcccaatttctacgacaataacgaaccgcttaagattaccttgtcgaaccagattagcccttcaaaaaatgcgcagaagtatttctcgaaatatcagaagctccggaattcaattgcctacgtcaatgaacaaatggcaaagaccgaagcagaacttgcctacttcaacacgattatggcgcaaattgaaattgctgaacccaaagatttagaggatatcaaagctgaattacaggctgaaggttatttaaaggctaagaaaaccggtgccaagaagcagaaacgttacaagattagtgaacctgaagttttctatgcgagtgatggtacccggattttcgttggcaagaataactatcaaaatgatcaattaaccttgaaaaaagcccataaaactgatatctggttgcatgtgaagaacattcccgggtctcatgtgattattgatagcccagatccatcagaagatacgcttcaagaagccggcaacttagcggcctacttctcgaaggcgcgcttatcagcggccgtgccagttgattatattcaggttaagaagattaaaaaaccgaacggtgcgcgaccagggtttgtgatttacgaagggcaacaaacactttatacgacaccagacgagcaactcgttcaaaagctacgtaacaaacctgtgcaagactaataaaaagcgttactccaaagtgaattggggtaacgcttctttgattggtgcggctgatggcacacgctaaacgtgttctgcaagccattactttccggttaacactctattctaatgggcgtctgaccatgcttgtgggtcttggcgccattcattgagtgatgtggcttgttctggagttaagttatcagcggcttcttcgaccgctaataaggcggagaaattcgataaggtcgttagtggtaagttagcagttgcgaaattctgttggccggctgctagttcgtatgaaaagatgccaaaaataccaaggacttctgcgccctctttttgagcggcggccgctgcttgtaagacactcccgccggttgaaattaaatcgtcaatgaggactaatttttgaccggctttaaacggtccttcgatttgacggccttgaccgtgatctttcggtttcgaccgaatgtaaaccatcggtaagtcgagttcggctgcgacccatgcagcatggggaatccccgcggttgctgttccgccgatgacttcaacgtctgggaattgcgctttgattgccgcagctaagttgctggcaatgagcttgcggacttttggataaccaatcgttaaacggttatcgcaatagatgggacttcttagcccactcgcccaagtaaaagggttgttaggactgagactgacggcatgaatatcgattaaggcttgtgcgacttggtgtgcaattgttgtcatttgaaagactcccattctgatttgatagcttggtaagcttgatatggatttgtagcttgcgtaattgggcgcccaacgacaatcgccgagctctcagcttgtgcggcttcgtgtggtgttacagcccgtttttgatcattggtttggcttgttgctggccgaatcccaggtgtgacgcagagaaaatcagcattggtgtgttcgcgaatcgttggcacctcttgagcagaacagaccacgccatcgcaatccgagttctgtgcgagttgcgcatagtgtgcgacagattctggtaggctgacattaacgagttgttcggtttgcatttgcgcttcgctggtcgacgtaagctgcgtaatcgctagtagtttagcgggccgcacgttgccaagtgcggcgccttttttcagaccagccgcccctgctttgagcattgcctgcccaccagctgcgtgaatcgttgtgtaatcgacaccgagttggccgataacagtcatcgcgctttgaacggtgtttggaatgtcatagagttttaggtcgagaaaaatctgatagccgcgcgcttttaacgttttaatcagctgtggtccctcttggtaaaaaagttccatgccgactttaacgaataaggattcatcagttggaaattgcactaaaaaacgatctgttgtttcccagtttggaaagtcgagcgcgataattaaagggttagtcatgagtgccctcctgtggtagaccgaatgattttaaatcggttagttgatatttagcgagttcatctggtaatgcggcgattagttttggacaggcaaatggatcgctgaaattagcagtgccgactgcgatggcattggcgccggcggccattaattcaagtgcatccgcagctgttgagacaccgcccattccaataatcggtaatttcgaaattgaacggacttgatgaatgagccggatggcaacgggttttatcgctggtccagataagccgcctgtttgattagcgagaattggttggcgtgtttttggatcaatccgcatccccaccagtgtattgattaatgagaagccggctgcccccgctgcttcaactgcttgcgcaatcggacgaatatccgtcacgtttggtgagagcttcacgtaaaccggcacttggctgactgcaacacaggccttcgtcaacgtggcagcggcttctggtgatgtgccaaattcaagaccgccatgggccacgtttgggcacgagatattcagttcgatggcatggacgttgggcgcttggctgatttgttcacagacagcgacgtaatcagcttcggtattgccggcgacattggagatgattggtaactcgggataatgctcggctaaccagggtaatttttcttgcataatgacttcaatcccgggattttgtaagccaatcgcgttcaacatcccacttgggctttcagcaacccgtggtgtcgcattgccaagtcggggttctttcgttgccgctttgataataattgcgccaagttcgttgaggtcataatagcgaccgtattcctgaccgaagccaaaacacccggaggcgggcataatcggattttttaaagctaagcctggtaaagttactgctaagtctgtcattaaatgagcacctcgttcgttttgaagacgggtccgtcatcgcaaattttgagctgaatgcttggatcacgtttgagtttggtgacacaggcgtagcaggcaccaatcccacaagccatccgttcttccaatgagatataggcattgggatgctcactgaatcgattatcgacggccattaacaagccttttggtccgcatgcgtaaatggcatcatatcgggttgtcgcatcagcaaactgtgcatcgagtaataaaccaacatggccttggtagccgtacgagccatcatttgtcgcataagcgactggcccgagcttgcgaaagtgatcttcatagaaaatggctgctttagttgcaaagccgaacacgtgttgaacgtgaacgccttttgcattaagttgccgtgagagttcatgtaatggtggaatcccagtcccgccaccaatgattagcgcgttttgtccggctactaattggtcaattggataaccgttaccaagaggccctaagacggacaagcttgtgcccaccggtgattcacttaagatcgtggtgcctccaccaacaacgcggtataacaaggtaatcgtgttagtttggcggtcgacattggcaatcccaaatggccgacgtaataaaagggcgtcactggggattttgatatcgacaaattgtcccggtgcaatgggttgctgtgcgaggtctccggtgaggcataattcatagatactgggggcaatttcggtttgcttagtgagggttaattggtattctaatggcaacatttagcagcctccttctgatttttatgtaataaaagagccttaggcaaagggcttcagactcttttagtggttttaaagtggtttggtcaggagcgattgagattctaggaccgctaagatcgcatcagcggtatccaatgaggtcatcaatggaatgccgtgttcaatggcggtttggcgaatgacgatgctgtctttagcgacttgtggggcttcgttcaagccggttgtgttgatgaccagttgaatgtggccggctttgattttatcaagtaaatcgccgctcgtagcattaatcttggcaacggattgcactggcacacctgctgcttggaattcttgactagtcccaggcgtggcaatgatttgatagccaacttcgcggaagcgttttgctaattcgagcgcttgtgtcttatcttggttagtaattgtcattaagacgttcccgtgacttggtaagtgcatcccactagcttcgaacgctttatagagtgctttttgcatcgttacgtcagttcccatgacttccccggtcgatttcatttctggcccgagtaagctatcaacccgcgtgagtttcgagaatgagaagacaggtgctttaatatgaattagtgggcccgctggtaatagaccggttgggctctttaattcagctagtgtgctgcctaaaatgacttgggtggccagttgcgccatcgagatgccggtgactttactcaagaatggaacggtccgactagcccgtggattgacttcaatcacgtagactgcttcattttggataatgaattggatgtttaacaagccgcgacattcaagtgctaaacagagcttggtcgtgtaagtgatgatggcttgtttttccgcatccgtcagattttgtggtggataaaccgccattgaatcgcccgaatgaacaccagcgcgttcgatatgttccataattcccggaattaagacatctttgccgtcacagatggcatcgacttcgcattctttgcccattaagtagcggtcaattaggaccggttggtcgactgaaactttaacggcctctttcatgtaatgtgtaaggtcttctgcagtatgaacgatttccattgcccgcccgcctaaaacgaaactaggtcggattaagaccggataaccaatctcttcagcaatcttcaacgcatctggcgtattggttgcggttgccccgactggttgtggaatgtcgagttcggcgattaattgatcgaattggtcacggtcttcagcgcggtttaagttcgcgacgcttgtcccgagaatctgcacaccattttcggtcagtggttcggcaaggttgatggctgtttgccccccgaattgcacaatcaccccttctggtttttcgagttcaacgacgttgaggacatcttctagtgtcagtggttcgaagtacaatttatctgaaattgaaaagtcagtcgaaactgtttctggattactgttcatgataattgcttcgtagcccgccttttggatggcttgcacacagtggacggttgcataatcgaattcaaccccctgcccaatccgaattggaccggaaccaatcactaagattgaaggctttgtgctgacaatgctttcgttttcttgttcgtaagtcgcgtagtaataaggtgtttgtgattcgaattcggctgcacaagtatcgaccatcttataaactggctgaatgccactttcttggcgcatttggcggacttgggcaggcatgatttgccaagttgcggcaattttagcgtcggcaaagccatttttcttggcgagttcgagtaattctaagtcacctttatcggtccggagttgttcttcaatttcaacaatgtggctgagtttatccaggaagaaaagatcaatttttgtcaattcactaagttcttgaattgaataaccgcggcgcaatgcttcggcaaggtagaaaagtcggtcgtcttggggatgtacaatccgttggacaaggtcgttatcaccgactgccgtcaatgctggaatttcgagatggtcagtaccaatttcaagtgagcgaacggctttgagtaatgcttcttcaatgttgcgtccaatggccatcacttcaccggtggccttcatttgggtgccgagttgccgatcacctttgttgaatttatcaaatggccaacggggaatcttcgcaacgacgtaatcgagcatcggttcaaattgcgcataggttgtcccggtgattggattatgaatttcatcaagtgttaaaccgatggcgattttagccgccatttttgcaattggatagccagttgctttagaagcaagggctgatgaacgactcacccgtggattgacttcgataatgtagtagcggtcgctattaggatcaagggcgagttgaacgttacagcccccttcaatcttcaaggcgcgaatgattttaagtgcggcatcgcgcaatgcttggacttcacggtcacttaaggtttgaacgggtgcaaatacgatggaatcgccagtatgaatcccgactgggtcgaagttttccatgttgcagacgactagcgcgttgtcatttttgtcgcgcatgacttcgaattcgatttccttgaaaccggcaatactttgttcaacgaggacttgtccgactggagataggctaagcccgtttttgacaattgtgctcagttcaccggcattttcggcaatcccgccaccagtgccaccaagggtaaaggctggacggataatgaccggatacccgttttcgttaacgaatgtttgggcttcaacgagtgaatgggcaatcgcagattctggaatcggttcgtttaactgattcatcaagtttttaaacagttcgcggtcttcagcttgatcaatcgcgctgagcttggtaccgagcaattcaatgttcagctcggcgagaatcccgttgtttgccagttccaaagccatatttaatccggtttggccgccgagggttggtaagatggcatctgggagttctttgcgtagaatttgcgtgacaaagtcaatcgtgatcggttcgatataaaccgtatcagcaacggctttatcagtcatgattgtcgcaggatttgagttaattaaaacgacttggtagccttcttctttaagcgctaagcaggcttgagtgcctgagtaatcaaactcggcggcttgaccaattacgattgggccagagccaatcactaaaattttatgaatatcggtacgttttggcatcactaaatcccctctttactatttttggcggcgattgaagtcatcgatcatgtcgataaattcatcgaatagatgtgcagcgtcgtgtggaccaggggctgcgtctggatggaattgaacggaaaaggccggatattgtctatgacggagaccttcgactgtttgatcgttaatttcaacgtgtgtaatcagaaggttttgtgggtcgatggagtcggcatccacggcgtacccatgattttgagatgtgaagtcgatccgtttggtggcaacttctcggaccggatggttgaaaccacggtggccgaacttcatcttgtaggttttagccccattggcgagggcaaaaagttggtgaccgagacaaatcccgaaaatcggcactttaccttgaatccctttgatcatttcaatggcttctggcacatcttctggatcaccagggccgttggttaacatgacgccgtctggatcgagactcagaatttcttcagctgttgtgttgtatggtaagacagtgatgttacagtcgcgttttgacagttcacgaaggatactatgttttaagccaaagtcaatcacgacgatgttccgcccgttagcaggactcggataaggtttggccgttgagacttgttggacttggttttttggtaagaccaatgccttgagttgatcgaacgcgtgatcgtctgcggcatcaacgatgctggctttcatggtccctttatcgcgcagacggcgagtgagtgcccgcgtatcgatgccggcaatcccaggaattttcttttgctttaaaaagtcatcaagactcatattcatccgccagttatttgctaggcgtggtgtttcatgggcgacaactcctttacaggttggtttaatcgattcaaagtcgtcgcggttgaccccgtaattaccgattaaagggtatgtaaaagcgatgatttggccgttgtatgattgatcagtaatggtttcttggtacccactcatcccggtgttaaagacgatttcgcctgtcgagataattggggcgccaaaaccggtgccggggaagatggtgccatcttctaaaataaggtaacgtttcatcttttagttcactccttttttgaacgtgctttcatcaacaacttcttgtcctttacgacacttgtcaaatcggtgtctgcaacaccaatccgccaagtcaggtaaatgctcagaagttacccgttgatgacacactccttttgatatgcaatctgaccagcaaccaaggttaataaagtatcaccttgcactgcttcgccgataaatggcgtgttgtggcctttcgataagaaagtgtttgcgtcgattgtggtggtatccgttaaattaaaaacagcaaggtcagctggttggccaaccgctaactggccggcgtgtggtaagttgaaaacatgggccgggttggttgttagccagcttgtcagttgcgcgagactaaatggaccgttggcaactaaatgcgtgtatagcaagctaaaggctgtttcactccctactataccaaatggcgctttcaataacgcctgttgtttctcttctgtggtatgcggtgcgtgatcggtcgcaataatatcaatcgtcccatccattaagcccgcccagagtgcttggcgatctgcaagtgttcgaagtggcggattcattttgagcattgcgttgtcactggtaatcgctgaatcatcgagtaacaaatgatgtggggtgacttcgcaagtgacgttgaggccatcttgttttgcgcggcgaacgagattgacggtttccttagttgagatgtggcagatatgataatgaacgccggtcgcccgcgctagctcgatatcccgggcgacttgggcggattcactgacactcgcaattccgggaacgcctagttttttagcggcttgaccgtcgtgaatgacgccgccattgacgagtgattcatcttcgacgtgcgcgacgatgggcatgttaatctgggcggccatctgcatcgcttggtacattgtttgtgccgtttgtaccccatgaccatcgttggtaaagcctgctgcaccagctgccttaaacgccgacatgtcgacaattgtttgttcagttaactcattggtaatcggtgcaaattgatatgtgtggacgctggtttctgcctgattgcgtgcaaccagtgtcttgaaatctagcaagttatcaggtacgggctttaagttcggcattgcaattacgctagtaaaaccaccgtgggcaaccgctgcgctccctgttttgagtgtttcttttgtcgtgaagcctggatctctgaagtggacgtgtccgtcgattaagccggcactgacgaaatggccgtgtgcgtcataaatcgtttctgggtcggttgggactgcggtaatcgttggttcaattgccgtaatctgaccggttgcatcgatggcgatgtcgcgtttttgcagttggccgtcaatcaagacttggccgtttttgatcaattgatacatagcagatccccctcttaatgttgaatcagatgttgttggtctaataggtgttcaatgatggccatccgcataaaaacgccgttggtcatttgtttaaaaattcgcgattgtggggcttcaacgagttcgtcggcaatttcaacgtcacgattgacgggtgctgggtgcaaccagatagcactggacttaaggtgtgctgcccgctcagttgtcaaaccgtactgagtatggaatgcagtgtcagataaggtttcatcggcagcaaagcgttcgtgttgaatccggagtaacatgacgacgtcaacttctggtaagacgtcatcgagttgggctggttgtccgtattgggcaaattcaggggcgaaccattcctcagggccggcaaaatacaatgttgcgccgagttgtttgagcagttgcatatttgaccgtgccacccgggaatgacgcaagtcaccacagatgacgacttttaagcctacaaagtggccgaactcttcgtgaatcgtcattaaatcgagtaagcattgggatgggtgttgcccactcccatcgcccgcattggccagtgccatgtggaattgatcatctgcgagtaaggcgtcgtaataattattctgagaatggcggacagcaacgaaatcgacgccaatggcttgtaccgttttgagcgtatcgctgagggtctcgcctttggaagtcgaactcgtatcggcattgaagtctaagacggtcatgccgagtttgcgttctgccatttcgaaactcgtatgggtccgtgtgctattttcaaagaataggttcattgcgtagaccggccgagttaatttgcttgtcgcgccctttttaaaggcgctagcgcggttgatgagacctgcgactaaatcattggtgagttgatcaacggaaaccaacgcgttatgcttttgcattttgttgagcctccaattcaagttcgctctttgctttatccggtaaaacaaggtttaagacaatcccaaggacggtggcgatggctagccctgagaattggtattggcctaattgtaagtaggcattgccaatcccgatgacgaggattgatgaaccaatcattaagttgcgtttcttatcaaaatcgacttgtttgtcgattaagacgcgcaaaccgcttgaggcgatgaccccgaagagtaagaagctaatcccaccaattacgggtgtggggatgctttgaatcaacgcgctcagtttgccgatgaagccgaagatcatggcgaagaatgcggcgccacctaagacccagacactgtggactttggtgatggcgaggacaccgatgttttcaccataacttgtgacgggcggtcctccgacaaaagcggcgatgattgaggctgtcccgtccccggctaacgtgcggtgaagaccaggatctttaaagaagttacgcttggtgagtttgtttaagaccataatgtggcccatgtgttcggtcattgtgacaaaggcaattggtgccatgctgagaatcgcgccccagtacagaccgggtttgtaagtgacaaatgggacttggaagtctggtactttaaaccaaggggcgtccatcacgggttgaaaatcgacgatcccgaacaagacggcgatgatgtagccagcaatgatgccgagcaagatggggactaagctcatgaatcctttgagatacatattaaagccgatggtgattaacaacgttagtaaagcgactgcgaagaattttaagtcgtaattcccgtgggcattgatagtggcttgtttggcagctgtgccagcgagtgataagccaatcaccatcacgattgggccgacaacaatgggtggtaaggctttgtcgatccagtcggaaccaatcagactgactaagattgaaacgattaagtagactgccccaaccgccattgtcccttgtgcaatcccaggatagccagtcgttttcattaaagcgagcattggcacgatgaatgagaaactcgaccccatgtatgctggaatcttgcctttggtaatcaagaggtacattaaagtgccgaccccggaactgaataacgcaatccctgggtttaaaccgactaagattggcactaggacggttgagccaaacattgcaaacatatgttgaatggataaaccaatccatttaccggtgctgggtcgttcgttgacgtctaagaccgcatcgggatttctaaattgtgtagccataagtatttcctccatgtcgacgactttttgaaccaaaaaaagacacacgctccaacagattggtaggtgtgtcccttgacggacttaggcccctttttttaggcgcactaagttcaagacaaacccttttgctctctctggagacaattaaacggttcagtcgttatttagttagtttttcgatggtaatcccatcatgttgatcaatttcttccatcgcaacgcgaatttgttcgttgagcgcggttggaatatttttaccgacaaaatcggggcgaattggtaattcacgatgaccacgatcgactaagacagccaatgaaattttctttggccggcctaagtccattaaggcgtcaagcgcggcccgaatcgtccgccctgtgtaaagcacatcgtcgattaagatgacatgcttatttgtgatatcaacgggaatatcgctcccgttaatctgtggttcattttgtgtatcaagatcatgttgatcatcgcggtataacgtaatgtctagtgtaccgacgggcaatgcgatgccttctaattgttcgaggcgttctgcaatccgttgggcaataaacacgccacgggttttaatgccgacgaggacgagatctgaaatccccttattctgttcgataatttcgtacgtaatccgagtaaagacccgtttcattgtgttactgtcgaccacttctttgaccatcgtaaagactccttccaaacaaaaaacctctcaaaccgataaggtcgagaggttacagttagggactccgcgtctagtggtgctttcaccgtaccttctcggcctcacgggaccgattttaaaggcttctattaagttagacctagcttaacggagaatccttgatttgtcaatgattttcacgtaattcggttaaagttttctcgaagattgcgggtaatggggcttcaaagcgcatcatttcgcccgtcgttgggtgcttaaagcctaatacagcagcatgtaagaactgaccatgcccagctaaagttttgcggggaccataaacgggatcgccagcaactggccggttaatataggctaagtgaacgcgaatttgatgggtgcgcccagtttctagtcgacatttgattaatgtgaagtcttcaaaccgttccatgaccgtaaaatgcgtgaccgctgggcggccatcttcgacgattgcttgtttcatccggtcgacttttgaacgaccaatgggtgcatcaatggtcccctcgtcttcttcgatgttgccgtggactagcgcgatatattcacgtaagttttccttagctttgagttgggcggataaagattcgtgggcttcgttggttttagccaccatcaaaagaccagaggtatctttatcaattcgatggacaatccccggccggaagacgccgttgatttcagacaatggggtgtgcgccaataaagcgttgaccaatgtcccattcgggtggccagctgatggatgaaccaccatcccttgtggtttattgactacgaggacttgatcgtcttcatagacgatatcgagcggaatatcttctggggttaagtcgagcgtgacagggtctggaatattgacggtgacgacatcccctgttacgactttgcggttactcttacaaggttgatcattgacttgcaccaagtcttttttcaaccattgctggatttgtgaacgtgagtaatcgggtagtaattgggtgagcgccttatcaatccggcctgtttcagttgtaatcgttaattgtttagtttcagtcatgagtcactttctctttcaacaaaatagcaataaagacgcagatgacgcctactgttaaggcaacatccgcaacgttaaagatggggaaattaataaattcgatttggaacatgtctacgacgtacttaaggtggagccgatcgatgaagttaccaagtgttccggctaacagcaacgttaaaccgatccggtaaaatttttcagtgcgatcagaggtataaaataagtagccaattaccccgagggccacaatggtgacgaggtagaaaaaccactgttgaccggccaagatactccacgcagccccatcgttttgaacatacgttaaactcagtacgttcggaataacgggttgggttgctgcaaaggcaacatgggcaacaatccagctttttaaaagttggtcaccgagtacaatgactgcggctaaaacgatatagatgagcatgggaacctcctattcatacaatctaccattgtccttaaaatcggctgacttgtcaatcagttttcgagatgggcgttaggatattggaaaacgtgcttttcaagctaactttctgcgcttaaccaaatttgccaaatcgccgattgtatcggcaattcgtcaaattctattaatgctcagaagctaaccgtttcaaacgcactctagaataatccgctaatcaggccatcttctgtgacgtccatgttgagggcggctggtttctttggtagacctggcatggtgaggactgtgccggtcattgcgacgatgaagcctgcgccaagctttggaatcaattcacggacgtgaacggtgaaatcagttggtgcgcctaatgcttttggatcgtctgagagtgaatattgtgttttggcgatacagactggtaagtggtcccagccatttttttcgatttctttcagttggttgatagctttgccctcgaaaacaacctctttaccgccatagatgtcagtgacaattgtggttagtttcgattgaatgtcggcgtttgaatcatataatggttggaagtttttaggttgatcgagtgcttctaagacggcctgggctaaatcaaggccacctttaccaccatgtgcccaaacactagctaaaacggctttgacacccagttcagcacatttttcttggagcattgtaacctctgcttcggtatcacttgtaaactcattgatggcaacgactacgggaatgccgtaacgttgcatattagcaatatgtttggctaagttactaaaccctttgtctaacgcaccgagattttcagtggttagatcagctaaagcaacaccaccgttgtattttaacgcccgaacagtggcaacaatcacgatggtatccggagtcttgccaagttgtgggactttgatgtctaggaacttttcagcacctaagtcagcgccgaagccagcttcagtaatcgcaatatcacccatttttagggccgtttgggttgctaaaatactgttacagccgtgggcgatattggcaaatggtccaccgtgaattaaggctggtgtatgttcaagcgtttggacgaggtttggtttgagggcatcttttaaaagcatcgcgattgcaccggtgatttcgagctcgccaactgtgacgggttgccgatcataagtgtaaccaatgacgatttggctaatgcgccgcttcaagtcagtaatgtcagttgctaagcagagaatggccattaattcgctagcaacggtaatgtcaaaaccatcttggcgcggcatcccttgcactggaccaccaagtccaatgacaacttggcgtaatgcacgatcattaatatcaagcgcccgtttccaaataattcggcggggatcaatgttgagggcatttccctgttgcagatggttatcgattagggcggctaaagtattcacagcagcggtcaatgcgtgcatatcccctgtaaaatgtaagttaatatctgccattggtaccacttgggcatagcccccaccagttgcgccacctttcatccccatgacggggcctagtgaaggttcacgtaaagcaatgacggctgattgatctagttgacgaagggcgtcgccaagaccgacagtcacggttgatttaccttctccagctggtgtgggattgattgaggtcactaagatgagtttgccatcttctttttctttcaatcgattaatggcagcgaaattaaccttcgctttatacggtccatattgttctaaatcagcggccgttaaaccagcttgttcggcaattgccgtgattggctgcatctccttagcttcattttcctgtgctatttgaatatctgacataccgcccagctcctttttatttatgatactacctagtatagctgattacgtacggaattggcagatgggatgcttaaaaagaacgatattcttcgacacacttctttgtacgtggtaaaatgagcgcgtacgctgattaacatttcaaggagggattgtgatggaacgaggaatcgttaagtggtttagcaatgctaaaggttatggcttcatcagttatggagatgacgaggaggttttcgtccattttaccgcaatccaaactgacggctataaatcattgaataaagacgagccggtattatttgagattaaagaaggcgcccgcggtttgcaggcagctaacgtgcaaaagatagcagaataaaaatacgtttaaacgctaaaaaagagccacgacaagattaatgtttgtcgtggctcttttttatttaactattcttcaattggccaaccattttgtttcagttgttcaacgaatgcctgcttggctttgcgactaaggagtatttgttcgggttggtaatcaagttcgttggttttaattaataaaccatgtttttggacaataatggtcgtagtcgtttcacggttgatggttcgattatatttaaataccggccgtttaagcgtgatcacgtctgccgtcattgaaacacgatgcccgaaaatgacccatagcgtcaaccaaacggcaattaagccgatgccccacgattgccagtttaagttgatgagttcaagttgtacaattaaagctaatgtatagacgaagccaatccaagaccaaatcgtcacgaagtaagcataatttggttggtagaatgcggtggttgtcttttgcatgagaacactcctttttacgctttgtatcataccattaacctgaccctgctgtcagtgaaaggcggtaaattttaagaatgattaaactttatacggacgcagcaactcgtggcaatcccggaccaagtgcggcgggaattttaatcgtgacaccagagcgacaatatcaactacaagcacctttgccagaacagtccaatcatgatgcagaattttcggcggtcattcttggcttagaacaactagccaatcgggggcttaccacgaaaatactacagattaacgttgacagcaagcttgtctttcagagcctagaaaagcggtatgctaaacattatcaagctgccgtcgaccggattctagcacttgaggcgccctattcaatggtcatccaccaatggattccagagcgtcagaatcagggggcgcaccatctggcccaacagggattacctcatttaactgactgttgataggcttaactagcgctttgagcgtgattttagtaaaataataagcaacgctagaattttggaggagtacgatatggttttagttacagaaataatgtcattcatcatcttcattaatgccttattggcaattattacaattctgagacagccccgcgatattgcggccacctgggcgtggctgctagtcttaattttactacccgtgggcggttttatcctatatatgtttaccggacggggcttatcgcggaaaaagattttccaaagtcaatcgcaaatcgatgatgggctttccgcattggtcgacattcaacgtaaggaaaatcgtaaaaacgacctcttaccgaaaaagatgctttccagtgaagcatccgaaatggtgaatctctttttaaatattaataatgcacccgttttaaagaataaccatgtcaaaatctatactgacgggcaagcaaagtttgacgccctctttgccgacatcaaacaagctcaaaaaagtattcatatcgaatattatacgatctataatgaccgattgggcaatgagttacaacaactattgattcaaaaagccaaagaaggcgtttcagtcaacgttgtctacgatgcttggggctcccaaggcgcaacgcaaaaatggtggcgcgcacttgaagatgtcggtggccacgcgcgaacgttcttcagttcaaaacacacgattaccgattttcgcttgaacttccgtgatcaccgtaagattgtggtaattgacggtaagattggttatattggtggctttaacgttggtgatcaatatctaggccggagtaagaaattcggacattggcgtgatacccatatgcggattaccggcaatgccgtgttagccttacaagtacgctttatgatggactggaacgcgagtgttgagtctgcgattaagttaacttactcggaagaactcttcccagtggaccaatcccaaaatcgtggatcagcagccatgcaaattgtctcaagtggtcccgataaattagatgaacaaatcaaactcggttatctgaagatgattagtaccgctaagaagcgtttatggattcaaacgccctatctagttccggatgatagtattattgatgcgttgacgactgcggcaatgtccggggtggatgttcgtatcatgacgcctaacatgccggatcaccccttcatctaccgtgcaacagaatactacagtcaactcttgcatgcagctggcgttaagatttaccggtatgaagatggattcttacatgctaagacggcggtcatggatgggcatatcagcactgtaggttctgccaatatggatatccgtagtttcaagctgaactttgaagccaatacgtttatttacgatccgaaagttgcagcgcaacttgaagcgatctatcaggctgatatggaaaaagcatccctactaacagacgaaataatcgcccaacagtcaacttggttgaaatttaaacaaaaattttcacggttactttcaccaattttataaaatgttcgttaactcatttttatgatggtgcaatattaaattaatcccaatctaaaaaattttttaaaatctgttaagctttgtccggcgtgcttttgaaaaattttgcgcattagcagggattgactttacccataaatatgtttaacttaagtacaggacgttgcccaagacaatcaaatgaacattcgtaaacgaccactataattagtggtcgttttttgttttatctacaatatgtggtgtttattgattgcatcttccatttcaaaacggtatactatttttatcgataagagaaatacaagggagttaacgattatggcaaatatcacattatatactaagaacggctgcccacaatgccggatgacgaaacactttttagaaacgcacaacgttccttttgttgaacataacatcaatgacgaaccacaatatattgattacttgaaggaacaaggtttccaagccgttcccgttttagaagcggatggcctagaaagcttctcaggttttagaccagcggaattgcaaaaattggcgatttaagcaccatgcattcccagttttaacgggtgaggccgactcttgattactaaagagttggtcttcactttttttaaaccctaaaacagctaatatgactagaaagtggtggcaaggatgtctttaaaagagattaaaaccgaagatgtaacatactatgaattgaataaccaaattaatattccagtgaatggtcaaattccattacaaaaggatcaagaagcactcgatgcctttttggaacaaaacgtacaacccaatatggtgacgtttaaatcacttcaagatcgtctagattatttagtcgcggaaaattattatgaagcagattttttgaaggcttattctctttcattcatggaagaattgaatcaatatttaaaggaccaagacttccacttcaagtcatttatggctgcttataagttctatgcgcaatacgcattaaaaacaaacgacaatggcttttatcttgaagattttaaagatcgcgtttttgtgaatgctctctacttcgcagatggtgatcaaacccttgcgctgcaactagcggatgaaatgatccaccaacgttatcaaccggcaacaccatcgtttttgaatgctgggcgttcacggcgtggtgaattagtttcatgtttcttactccaaacaaccgatgatatgaattcaattggtcggacgattaactcggcacttgaattatcacggattggtggcggggttgggattagcttgtcgaacctccgtggagctggcgatccaatcaaaggcatcgacggtgcagcaagtggtgtcctacctgtcatgaagttattggaggattctttctcatactcaaaccaattaggtcaacggcaaggcgccggcgtggtttatttaaacgccttccatccagatgtgattgctttcttaggtgctaaaaaagaaaatgcagacgaaaaatatcgtttaaagaccctctcattaggcttagtcgtccccgacaagttctatgaattggtgaaagctgatgctgatatgtatttattcagcccttacggtgttgaaaaagaatacggcgtacctttctcatatgttgacatcaccaaagaatatgacaacttaatcgccaacgataacatcaagaaaaccaaaattaaagcccgtgatttagaaaatgaaattagtaaattgcaacaagaatcaggttatccttacatcgtcaatgtggacacagccaatgctgcgaacccaattgatgggaagatcatcatgagtaacctctgttctgaagtcctccaagtgcaaaccccgtcacaaattaataaccgccaagaatatgacgtgttagggacggatatcagttgtaacctgggttcaacgaatattccgaacatgatgacgtcacctgactttggtggttctatcgaagccatggtgcgtgctttaacctacgtcacagatcattctgatattgatgtggtcccttctgtggctcatgggaacgaattggcccacaccattggtttaggtggcatgggtctgcataccttctttgccaagaaccacatgatgtatgggtcagaagaatcaatcgactttaccagtaattatttcatgcttttaaactactggacacttgttgcttcaaataagattgctaaggaacgtcagatgacctttgccaactttgaaaagagtaagtatgctgatggtagttacttcgatcaatacctcactgaagactgggcccctaagacggacaaagtcaaagcgattttcaaggacattatgattcccacaaaagccgattgggaagctttaaaactagccatcatgcaagacggtttataccatcaaaaccgcttagccgttgcaccaaacggttcaatttcatacatcaatgatacttctgctagcttacaaccgattgttaaccggattgaagatcgacaagaaaagaaaattgggacaatctactaccctgccccaggtctttcaaacgataccatgccatattatgaatcagcttatgacattgacatgcgtaaagtcatcgacatctacgcagcagcacaaaaacatgtcgaccaagggatgagtatgacactcttcatgcgttcaacgattccagcaggcctttacgaatggaaaaacggccggactgacaaaatgaccacccgggacttaaacatcttaagaaactacgcccaccacaaagggattaaatcaatctactacatccggacttacacagacgacgaaagtgaagtcggcgcaaatgcatgcgaaagttgtgtaatctagagtgcgtttgaaacggtttgactttgagcattagtctaactcggcgaataactgcttataagcagttattcgccgagtgtaactaagcgcagaagtcagtttcaaaaagcacgtttcaaaacagagtgcgacggcaggcgtttatattttgagcattagcatagggaagcgaattagcgaagtagtcgatgatttgattcactgggctaagcgcagaaagttagcttgaaaagcacgtttcaaagcaaacaccaaatctccactccagctgctcgtcagctggcctacatacctaaaaaagaagcacgttaaaaggagttcatgaacatggcagaaaattatattgcaattaactggaaccaagttgaagatcaaattgataaagcaacctgggaaaaattaaccgaacaattttggttagatacgcggattcccctttccaatgacttagatgactggcgcagtttaccagacaatgaaaaatggatcgtcgggcatgtctttggcggtttaaccctacttgatacgctacaatcacaagatgggatggccagcttaaaagccaatatccgcactcaacatgaagaagccgttttaaacaacattcaattcatggaatccgtgcatgcgaagagttattcatccattttttcaacgttaaacacaccaactgaaattgatgaaatcttcgactggaccaacacgaatgaattcttgcaatacaaagccaacaagattaacgatatctatcaaaacggcacaccattgcaacaaaaaattgccagcgtctttttagaaaccttcctcttctattctggtttctataccccactctattacttagggaacaataagttggccaacgttgctgaaatcattaaattgattatccgtgatgagtcagtccatgggacttacatcggctataagttccaattagccttcaatgaattggataagtcagaacaagaagaattgcaaaactggatgtatgatttactgtacgacttatatgccaacgaagaaaaatacacccacgaagtttatgatggcactggttggacagaagaagtattaacttacctccgttataacgccaacaaagccttaatgaacctcggccaaggcgccctcttcccagatagcgctgaagatgtgaaccccgtgatcttgaatgggatgtcgacttcaactgccaaccacgatttcttctcccaagttgggaatggttatcgcttagggaatgtggaagcgatggaagatagtgattacgactttgattaattaaatgcaatagcgcgccccactaatttaagtgagacgcgctatttttttggttattttttaaattgtttcagatatcgtccggccaataatttatgaaacttaacgcccaacgtcggatttgaggcatcaatatcggcatacatcgccgttgtaatcttgttgagtagtggcactaactggtcgagttctgcctcggtcaaggcgttcacaaacggtggcacctcttgattggcagtttcaatttcttgacgaccggcatccgttaagttaactaaattaacccggcgatcacttgggagcttacttaacgtcaccagctcgcgtttagcgagtttagcgacaaattcactggttgattgaggtgacattcccaaacgcgttgctagttcacgttgcgataagtgatcttcatcagcaagtgccaatagaatcttcccctggccttcgacgattaaatgcgggcgtgcttgtttaacgatatcatcgtagatcttactgagttgttcatattcagctaattttccggcgaccaattcggccttgacactctttgccatacgtcatcttcccttcgctgttttaattagtatacaccattccaaaatctaagagtagcaatccttgacattttaatcaggtgacctgattattaaatgaggaggcaatattatgtgcagtgagcatgtcattgaagtaaacaatattcaaaaagcatttgggaccaaaaaagtggtgcgttccgtttcgctagccgtttctaaaggtgagattttcgcattattagggcccaatggtgccgggaaaacaacgctcttaaaaatgatgaccaccctcctacgaccagatagtggcacaatcacattaaatggctttgatacgataacacaaagccgccaagtgcgccaacagtttagtgtcaccaatcaaacagcggcaatcgatcaagacttaagtgcgcgcgagaatctccgcttatttgggcggttaaatgggctcagtgccaaagcgagtcgaacccgagctaacgagttactgacggactttgatttggaccaatcagcggatcaaacattggcgactttttcaggtgggatgcggcgacggttggacttagcggtcagcttagttggcaagccaaggatcctctttctcgatgaacccaccactggactggatccaagaacccggacgcaaatgtggcatgcgattcaaaaattagtcgcggatggctcgacaatctttttgacaacccaatacttagaggaagcggatcaatatgcggatcggattgcgttgattgatcatggccaattgattgccagtgggacacctagtgagctgaaagcgcaagtcggtggtcagcagttgcagctgacggttgccaatcaacaacaagttacccaggctcagacgatttgcgagaccgttttgcaacagcccgtgcgtgtgacggatcaaacaatcattggaccgttagtgcacgatgatatgggcgtcatcaccgcgattttaaatcaatgtcagctggcaggcatcaccatcagcgatttacaattgacagccccatcgttagatgacgtctttttgaaaatgaccgttggtaaaaactaaggagataataacatgctacaaatgaaaacaaatacgcaagtgttgcgcaatagcttaacgttaacccatcggaatttactgaagaccttgcataatcctgataatgtcagtgatgtgctggcgccctaccgctaattttggcgcactcatgatggcgttattcctagctgtctttattggctggtcaacgtcgtggattttcgccttagtcggtttactggttaaaaatgtcgaactgattagtagtttatcgatgatcatcattctggtattgaccttcttatcgaacgcctttattccagttaaaaccttaccgcattttctacaaaccattgtccgcattaatcctgtcaccacaaccattacggcaatcagaggaattttgaacaccggtcattggagcggaaccgcaacaatggtcctcgtcagtggcgctgtgattattctggtgtttatgccactgacagtcatggcgtatcaacggcgtgactagaataaaatagcgcgccgcacttgtaagatagtgagacgcgctattttagtttaaattacttggtagtcgatttgatcaatcttgattttgggtaattcatcaatattcttgtctgtaatgatagcgaaagagacatacgcgcgatcattttcaggaagctcttcgtaagtgatcgtgccgtacgcaagtttaaacagcttagcatgcttacctacttgatctttagcgattgcaaacacatttggctggtcaaaatacgtatttgtagtttgttctttgccaccttcaagatagtgtttcatagcagtggcatccttgatgaacccttttacagagtttagcactaaataatcgttaccgacgcgataaatataaccagagactttcttttgattcgaatgagtcgtagttgttaatctgattgttccatgtttaggtaaactagtcccttttttagtctgtgttttggatggtgtatgtgtttcaatggaacgattgcaaccagtcataaaaaacattgtgatagatagtaataaaataaagactggcattatttttttcatagtgattgttttctccctgatcattgaatttgataaattggatagcgattgtagagcgggtcgtttagattggctgtggcaacaatggcttgtagtgtgaagtcgcgtggaatgcccactgtgaccatcccatagccaaagtcttggtgtggtttaaactgattatcggcaataaaaatgaagccgtcttcgtccagtttttgataggaatcgtgcgctagtgtttgcgtagttgtttgactcaaaaacgttttgagcttatttttcgtattcagttgttcattcggttgatgcgcaatgacgaaaaaggttttatgccggtaagacagccaataggcttggacatcttttttgtcgtaagtctgttggttttgtggacgcaccgtttttttctgcgaactatgctgaggcgtcgttgtttttgcaggatggttctgacaggctgttagtcccaataatgcaacggtcagcgtcaatgttagccagagatgcctgattttcataagatcagtccttcacagtttagtttaccccctataattataacagttacgcctactttgactagtcttaaatattaagttttatcgaaaaacgataaaaattaattgtttttcaataaaaaacgattataataaaactattcttaaaaacgaggtatcagatgaatgttaaaaaaatggctacttagaatggcattactcggaattgcggcggtatttggtctgttaagtttgttagtgacgatccaaattgtgaccacgaaacacttagaatacccagcgacaatctggatgttggcgattgctgcgtatggtgtgacggctagtatttggtttgcattaatcaagttggcgcagattctccgcttaattgagcaccatcaagtttttctccctcagacgctacgatatgtatcagcaattagaaaagcgattttggttgcgagtttgacggccctttttgccctaccctttttctaccggattacgcaactcgaagatgcaccaggcttgatgttgctggggttaggcctggtcttcattccgtttgcaatcctcattttgatgcagattgttgaagatctttttaaaagtgcaatcgcctttcaatctgaagtcgatttaacggtctaaggaggaattcaatggccattcgtgtgaatttagacgtaattctcgctcaacggaaaatgagtgtcacggcgcttgctgaacaggtcgatattacgattgcgaacctttcgaatttaaaaaccggtaaagccaaagcaattcgcttttcgacgctcgagaagttatgtcgcgtattagactgccaacctggtgatattttagaatatagcgatgattaatcctgcggcccccttttatcggggaccgcttttttaatgcttcagtacactggttgatgcgatatgtagtataataaatccgtagtgattatgaaaggggttttatgctgatgtattacgttgtgatgaagtcaaatgatattcgccgaaacttggcaaccgaacaatatttaatgaatcaaaaaaatttcgatgaaccactcttactattctacattgagaaaccatgcattatcgtgggccgcaaccaaaatacgtatgaagaaatcaatcaaaaatacgtggaagaccatgatattacagtcacacgccggttgtctggtggcggtgggatttatcaagatctcggtaacctttgtttcagtttcgtggtgaacgcagattctgaacaattcggtgatttcaaatccttcacgcaaccaatcgtcgatgcactccatcaaatgggcgccacaacggctgaagtttctggtcgcaatgatatgttagtggacggtaaaaaattctcagggaacgcgatgtacaccaagaatggtaaaaccttctcccacggcaccctttcatgggatgttgatttagatgttttgacccaagccttgaatgtccctgcagataagattgtgtcaaaaggcattaaatcgattcgacaacgcgtcacaaacctaaaagggcacgttgaccctgaataccaaaacatgtcgacagaagagttcagagacgtcttattactgaacttgatgcacgccgatcaactagctgatattgccgaccgcgaatatcaattaacggccgcagacgaacaagccatcgataagatttttaacgatctctatagcaattgggactgggtctatggcaagtcacctaaatcaacgattcaaaaacgcaaacacttcgatttcgggacgattgatgcgcgcttgttaatcgaaaatgggaagattgccaacgtcaagttctacggcgacttcttcggttccggcgatgccaacgaattggctgaaaagttagtcggcacggtttatgaccgtgaacatttagcaagcactctcgaaccaatcgacaccacgtcctacttcacagggattccaaaaacagaattagttgaattattagcacaatagtaactagctaaaaagagctactaccaaaataatcttggtagtagctcttttaggttaacgtgcaaatcgtttaaaacgaatcgtcatgcgtctggtttgcatgaagtgttgacaaataccagcaataactaatgggatgaggatgcctattaccccactaatccagaaaatcggttggtggaatagatttgcgagttggttcattggttgatcaccaggaatgttcaggacaaaagtatccacccagcttggtaacatgcgttcaatcgctggttcaatgtagtgttgatagagtgtcgacagaattagccatgcagcaaataagaaaagccaagctttacgttcaaataacgtaatgaaactgctaatggcaatcccttctgccatgatggtccagatgagtacaatggccagcaggacgaaacggctatcaagaaagaagcgattaatcccactttggtgggcagcaatgaagtatgtgccgccgtagagtgctaggaaactaatcaattgactgctgaagaggctaatcacttgggtggtataactaatactgcgcggaatgccatttagaatcccaaaattaaacggcttgcgggttgtcgcaaacgaaaggaaaatcagaacgagttggctgacgactaaggaaccgctcaagagcgtgaaccaaaaggccttccaggtcatttggttggagaagattaaaatggaaccgcctgtgatgatgacgaagacggcaattgccattaataagccgcgccaaatcgctgctaggcggtaccgcatcattgcattaaacatgtgcttcacttcctttgttcgttaatttaatgaaagtttcttgtagatcgatatggtcaatcgttagacgatctggaataacccgttcttctggtaagacgtcataaagataaaccgtgtataaggtccccatttgctgggaatctaagacgtttaagtcggtacagtactcgcgaacaagttcttccgggccactgacacggtaactcttggcgaggacggtttccaaatcatcatcgacaattaattgagcgtcgttcaagaccaagacgtgttcgactaaggtcgcgatttcttcgatgatatgggtcgcaacgacaaatgtccgtggccgactttcataggcctgtaaaatgtagcggtataagaggctgcggtagttagcatctaagcctaagactggttcatcgaggaaaacatattccgccggcacacaaagcgcaacaattgttttaaaaatcgtgcggtacccagttgaaagctgattgagtttcttttttggattcaaatcaaatgcagtcagcatttctttggcgagtgcatgatcaaatgaaccttgcagtaaggcggtatttttaataatggtccgcaatttgtcatctttattaaagagattgatttccgacatcaagtaaatcgtttgtaacggatgatcgcgaccggttaagaccgtatcgccccatttaatctcacctagggatgcagtttgatgattggctagaatacttaataaggtactcttacccaccccattgcggccgagtaagccgtaaattgtattgggtttaagtgttaagttgatgtcgtcgaggacgacctgtttcccaaattgtttaatcagttgtgtggtttgtaaattaggcatggtcataacccctttcaatcagtgcaattaggtcgtctttggttagatttaattgttgtgcttcagtgataaattgggcaacatagtgttcaaaaaattcagattgccgtttttcagtgatctgtgcgggtgcgcttgatgtgacgaacatgccgagtccccttttcttttcgattaagccgctggtaacgagttgattcatccctttgagtacagtggctggattgatattgaattgtctggaaatttcagttgtcgatgggacttgactaccaggtggaaagaccccagtaaaaataccctcttcaatttgttcggcaatctgccggtagagtggtgtatcattattaaattcaaaaagcatccggaacacctccgtttcgttaattggttagttacttatgtagttaactataatacgtaggctgcgaaatgtaaaccgctcctcaaaaacatttgattattcgttcatattcacctattatgtacttataatcaaatgttttcagagaggatgagaacgatgcagacagcctattgtttcattgatttagcggatagccgcacccgttttacggaacaagcacagacactccagttattgcaacacttcgccgacacgttgaatcaccattttccagcgttattaacaccatttgcaattaaggatggtgatggtctattgggcggtttttcagcggatgaccaggcacagattgttgatgtctatcccttttgtaatgcctatttaaagagtgacgcttttcaaactttctggcagacacattttgcggggctggcggagcccactttttattttggggttggcttaggaacgatgactacgccgagtccaagtgactatcaggatatcaatcgggtcaacgggacagcaattgtgaacgccctcgccgcagcagatcaagccaaactgttgcgtcaaggtgctgaattagcacaaggttatccctttatgacgacggcctttcaatttcaattagtggcagatcaaccagccgcaaatgggattaatgccctcttttatttaatttatgagcaactcttgaatacgcagttgcgcaaggacgcttttgctgaaatcgtgcttcaaccaacattgaaacgctatgaattagcggaattgttgtggaccaaatacggcgttgcttcctatgaactagactacagtgatcaaaaagggcgtgcattagcctctagtaaagtcagtcgcttactgaatcagattcagtatcccttgattgaacagaccctggcaacgttgcgcgcgcaactgatgacctttaaggaggcagtcgaatgaacctctttgcgcttttcttgcttagtcatattggctgcgactttgtctttcaatctgatcagatggctcaatgcaaacgatcaacgaaactcggtgtgaaatggtggccattatgcaagcacgcactgacacaagtcccgttagtgcttattttatggggtggcggttggttaatggcaccacctacttggccacattggcaaccgttactaatcggcttagtcatcattgtgatgagtcattggctcattgatctatttaagcaaaatagccagccacttttaaaagcacagctacatttaaccagcaatcgcgtaccagtgatgagttataccatcgatcaagcactccatttaatagtgatcggtcttgtgagcatgttcctcggccagcaatgggcgtttaaccatgtgaaccgattgttattggctgccagtattgttttgagcacgttattatttgccgattatttcattagcttctatttaaaaggactggatttaaacatggatcgcctgccagatggtgcaaaactgggtcggcatattggtcatttagaacggtttgccatcttaatcttgttttacacgcacaatgttgcgagtattgctgtgattgtggcgattaaggcgctgacccgctttaaagccattgaatccaacgaacaccacttcgccgaatattacctcattgggagtttgctcagtctgatcttcggctgtcttggcggttatctattaagtcttattgcgcattaaaaaagtgccacagaatcaggatttttcctgttctgcggcactttttatattattcagcgatgattaataatgatttaatcgctttgcgttgatccattgcttcataagcggcttgaatatcatctaaggtaaagcgttgtgtaaagactttaccaggattaatggcaccctttaaaacagcatccaataaacgagtgcgatcatgagtcgttacggcagcaattcccccacgcaaaccgatgttcttccggaataaggcattggtgttcatctctgctttttggggaatgccgacacgaccaatgacagcccctgcgccagcaacggcgacggcagtggcgacggattgttcggtcccgacacattctaagacggcgttggccccagcgttgtcggttaacgccatcacttttgcgaccccttcgtcaccgcgttcagcaacaatgtctgttgcgccgaattcaagggctaatttttgccggtccgcatgacgactcatcgcgataatccgtttcgcaccgagtaatttggcgccaatcacaccacataaaccaacggcgccatcacccatgacaacgactgtgtcaccgggtttcacttcagcggacacggcagcgtgatagccggttgccatgacgtctgaaagcgtcaatagattattcagcatttcatcagagtaatcgcttggttggccaggaactttaacgaggccccagtttgcattgtgataacggagatattcggcttggtagccaccaggattattctcgcggttggtacaatcgccatcaaaaccgtttaaacaagcggcacagtggccacaaccatgggtaaatggcacgatcacaaaatcaccgacactaacattttgtacgtcagtcccaacagcatcaatgatgccaattgcttcgtgaccggtgaaaccgcctacttctcgttttgaaatcccacgataccaccataaatcagaaccacagacgcacgcgcggataatgcgcacgaccgcatcggttggtttttcaatcgttggttttggtgcttcggtaatggtcatttgaccaggacccataaaagtagctgttttcataactataatctcctatctcttcctattatattgtctttactatacaccttagacctcactttaatgcaagctttttttaaagtccaatcgccagttgttgtttcttgcttaacacttcgtcttgggtaatcccaatataatggagcgtcgtttcttgcgttgaatgaccaaaatcaatcatcaatgaccgcacgtccccgaattgtttgtagaaccagtagccgtaagttttgcgcatcgtatgggtgccaatatcattacgcccaagtttcttacctgcttcagtcaacatgcggtaaacaccgttgacggtgatgtggttatcgccgacgcggctaggaaacaaccaatcattgcctagcaattcattattttgaatatagggactgatgtatgggcgtaaactcgccaaactaatttggcgccacttacccgttttttgttcaacaatcacgggattgtcttcgatcacatctttgacttttaactgcacaatatcagaacagcgtaagccagtattaatgccgagtaaaaataataaataattgcgactacccatttgtgaatggcgcaagatgactttcatgtcttcaatctcatcttttgtccgtaaaggttgaacatttaattttttgccttttttagtgcgcgatttccgcatgttttttccgcctttttgaccgcattctttttctctatatcattataaaccatgcggtggtattttgcacctttgattatcgttgatttaaagggattccgagcgcattctttctaccaaaggaatgcgctcaaacacattaaaggctattgatggctaaatcacggtctaatcacgtttataaacgatcaatcaccagaggcgcattttaaggacgtttcagattagtgagtggacaagtggtcgcgaaacttgcttaaaatgcgaattaaaaaaggccccttaaagtcacaaaaaaaacagcgttaagacaaaaagtcctaatgaagtgaacccccgatattggaccaaaatccaatatcgggggtttttatattgaccaaatattctaaaacattaaaaataaaagttgttcaggattatctaacgtcacccttaggttataaattaatagcgagaaaatatggtattaagagtaactcactagttgtctcgtgggttcaacgttataaggcctttggcccaaaaggactggatgtcctatcacccaaaaaaacatttgatggctcatttaagatgaatgttttaaaatggatgaaaacgaataaggcttcttatccgaaaaccgcacttcattttaatatctcaaacgtcgggaccatctggcaatggcaacatatttgggagactgagggtgctgatgccttatatcgttccaaaggacggcaaacaattatgtcagctgataaacaatcaaaaaaacggcaacaaacagagttagaacgtcttagagaagaaaatgagttgctacaaatcgagaatgaatacctaaaaaaattaagagccttagtccaggaagaagaaaacaacaagcgcaagtcatccaagagctaaggcttaaacacaaactagtaaaaattctaaaaatagttggtatggccaaaagtacgtatgaatacattattagtcatgaaccgaacggttcatctgaccaatctgttaaacaaaccatccaaataatcaagaagaatcatccagcgtacggttatcgtcgtgtaactggtgaattacatcgtatgaatatcttagtaaatcataaaaaagtacttgtcttaatgcgagaactgcaattactatcaactgcatttaacaaacgtactcgtaaatataattcatatagaggcaatgttggcaccgttgctaagaacttaatcaaccgtcgtttcttcaccgatcgtccttatcaaaaactagtaacagacgttactgaagttcgctggggaaccaagacaattgatgaacgcgcctatttcacatgtatttatgatttattctcaggtgaaattctcagccatcaagttagtaaacaccctactgttgaatttactacaactgttttgaatcgagcagttaagaaaatctctaagaatttaaaataccggacaacagtccactcagatcaaggatttcaataccagcatcaagattggactcatatcttgaaagaacatcgcatttttcaaagtatgtctcgcaaagcaacatgtttagataatgcagcaatggagagctttttccatattatgaaagccgaagctttctaccaaaaagaaaccgatacttatgaaacgctagtttcacaaatatcggtttggattgatgagtataatttttcaagaattaaaacaaaactgggttgtaaaagtccgattgaatatcgaatttttacaacctagaaagctgcttaaagtttcgtccaatatttggggttcacttcaaacgctgttttttaatagccggctgacaagtctaccggattgacggataattcacctttgtctaaataactgggtaaattttgatcgaaaattttgaagagccgttcatggatatcagcgatgtaacctgaaatatgtggcgtgataatcaggtttggtgtggcccataatggtgaatcacttggtaatggttcgttttgggcaacatcgattgctgctcctgccaaatgaccggattgtagatagtgcatcaaagctgcttcgtcgactgaagcgccgcgccctaaattgaagaagtaagcccctcgatggagttgcgtaaaaaaggtggtgtcgaagaaccgattggtgaccggtgttaatggcatcacattaatcacgaagtctgcttgtggcaatgcttgttcgtaatccgtgtcggttagaatctgatcaaaattggcaacgggtttctcgtgccgattaacgccaattgtgtgcatacccatgacgtgggcatactttgcaatttcctcaccaatttgacctgttccaaaaatgaggagtgtgcggtgttccaaatttgtcatttgttcaccaatagcatgatgctcccattgatgcgctgcttgtgcgggtaagctctgataaatcccacgggtaaagtgtaatatgtaacttaatgccgtctgtgcgattggttttgcgtgcatcccgcgtgcgtttgataccagtaccccttgcttagctaacgtggctagtggtaaataatcaacccctgagcttgcggtctgaatccattttaattgattaccgggctctgctaaaattttcgggcctacatctttattccaaccaaacataatctcaatactacccagttgacttggttttaaatcagctaaagcgatgattgttaaaccttgtgcagttagtgctttgacgtgttgttcaggaattgtttctgctgataaaatgactgtcaagtcgatccctcaccttattattgaagtaatctttattataagggattttcagtaaataaaaaagcattaccgactgaaaacggcaatgctttataaaaaattttattctttttctgcacgtggccatactggacgaccccagtattggaataaatcagtttgaatccgaccattatacaatttccggcgtttagttgcgcgttgcccgaatgattcttggaattgtaagtcacttgttaaaatatacttactccaagtcttcaatgaccgataggtatcacccatttctttatacaaagcacgggcttgtgtttggtcacttaatcgtttcccgtaaggagggttggcgatgatgaccccgttggttaaatctgtcttgaaatccttaacagcgagttgtttgaactggatatcatgtaaaacaccagcttcgttcgcattcaacttagcgatatcaatcatgttttgatcgatatcataaccaaaaatttcaagtggttggtctttttcggctgctttcgcttcggctttggcattttctaaaacagaagcatcgatccaatcgaagtcttcaaaggcaaacttacgatgcataccgggtgcaatgttgtgcccaattaaagctgcttcgatcgcaatggtcccagaaccagtcgttggatcaacaaatggcatatcaggttgccaacggcttaaaagaattaaggatgccgcgaagttttccttcaatggggcttcccctttttcaaggcggtagccccgcttgaataaactaggaccagttgtatctaagctgatcgtcacgacatcttttaggatgctgacttcaagcggatacgttgcgcctgtttcagctaaacgtgttcggcggtgatagacagtacttaacttatcaacaatcgcttttttagtgatggcttgcacgtctggttcgctatggagcgttgaacggactgagcgaccagcaactggaaaagcggcgtctaatggcaggaacttgtcccatggcaaagctttcacttgttcaaaaaggtcatcgaaggttttggcctcaaattgaccaatcgcgattttcacccgatcagcactgcgtaaccagagattggtttttgcaatatctgccacatcgccttcgaaatacacccggccattatctgaacgtgtttcataaccgagattttgtaattctttggccgtaatggattcaatcccactcgccattgttgcgtatagttggtaagtcatgtttttaaagatccccttaggaaattattttttaaataaaaagagcttgggcaaaagcccaagccacctgattgtaaacctttataggccatgttttgttccagaacttccccaggaagaaagttccttcagtaatcatctatctgttcttacgaactctcatttttagttcatttccataaatgagacgcccctaccaaagtttgggttactcgctcgcggggtttacctcgttccaccgtccaagtttccaaggacgctccgtcactgtggcactatttaaggatattcacgcatgaccgaagttttagcgctttttccgccgttaccgttaaggtaccctggcttattgggccaggcacgaacactacaagcatctcagcctgtgcgggcatggaccttcctcagcctaccgatgtagaccgcgattactcaagatttacaaatattgaatcaatgtttataagtatagcacaagattaaagatttgtctcgtcaaattgtgaatgattttgaactcttgtctgtggagcttgattttgttcacttaacttagcaccgaacacgtggcgttcaaggtttgataagcgtttcaaaatatcatagttggttgctgctgaagcttgttgtggtgcactttccttcacgttatcagaagcgctgagttggcggtttaattcgtcaaccttcttgaataagcgggcattttccgccgttagccgatcgattgcttcttgataagtttgatagtctttaataactaaatcaaggtaaccatcgacttcttcaggttcatagccccgcatttttgttttaaattcttttttcaatatatcagttgggttcaattcgatttcaatttgattgtccattttgacacctcatttagaataaatgtactatgattcccattatagcaaagttatcggataattaaaactcttgctgatctaattccgctaactcagtcgcgatatcttgtagttcgaaaaaatcgaccaagttaatcggataatcttgttggtcttgatattggcgggctgcatgataatcatattctggtttgcccggtgattcacgatcatagtataatagttgaccatccgtatgggtcagcatgaattgttgatactggcgcaattgttgcggtccagaatacggtgcgttaaccactggttcgcaaaaatcgactcgcgctttgagctgactcaattgagcttggttattttcgttccattgttgaccaaaatcattaaacggcaacatcatcgccaattttaaatccggatagtccgtttttagttcaatagcaacttgcagactccactgttcaatccccatttggccaccagtgatcacccactcgagcccatcatctaaatattgtgttaactgcttttttaatgaatatttaattactttaagtttctcgtcagtttcgccaaaaacaccgagttcatagcttcgatagccgctcacccatagtcgtttcaagtcaggtccctcccaaatgattttcaattaaactaaacattgctataatagtgaaacaggagtgtgattttcaatggcctttcattatcctaacggacagccttatacaaataatgagacaaaaccaactaaaaagcaagcccggcaaccagaagcaacaacgttatttggtaaacgcggcatgacgttggaagaagaactcaatgatagtaatcagtattatcgattacatgcaacggctgtcgtgtataagaaaccaacgccaattcagattgtgaaggtcgactaccctgcccgcagccaagcggttattaaagaagcttattttaaacaagcctcaacaactgactataatgggatttatcagggccgttacgtcgattttgaagcgaaggaaacgaagaataaaaccgcgtttccgtttcggaacttccatcaacatcagattgaacatttcagagcctgcttgaatcaaggtggcatctgctttgtcattatgaaatttgtcccgctacaacggctattcttgtatcccgcaacagaactgattagccgctgggacgcgcaagttgatggtgcacgaaaatcgatttcactcagtgatgtgattgacaatgggattgagattaagtaccaacttaatccaattattccctacttagatgccgtagatcagttattaaagcggtcaaataaaggagtttaaagaacaatgtccgataatcgaaacaataataattcgcgagttgcaaggcacaaagctgaagcaaaacccgctaataagaaacgccggcccctctttttaagaattctaaaatggctgttactactgattgtagtggctttcgtggctgggattggtttgtttgcctactatgttaaagatacaccaaacctaacgcaagcggacctgcaaagtccgaatgcgacaattctatacgatgatcaagggaaacctttcaaaacaattggtggcgaaaatcggagttatgtcaagagtgatcaaatcccgcaaacattaaaagatgcagtagtctctattgaagatcgtcgtttctataaagaaaaattcgggattgatccaatccgaattgcgtctgctgcagtcgccaatattactggtaaatcaccgctgggcttacaaggtgggagtactttaacccaacaattgattaaactgtctaaattctcaacgaaaaacagcgatcagactttcagacgaaaagcacaagaagcgtggcttgccgttcaagtcgaacgtcaatattcaaaagaccaaatcttagagtattatatgaacaaagtgtacctgaataacggggtcaatggtatggggacggctgctaagtattattatggcaagtcgttgaaggaattaagtttgccacaactggcattgattgcgggtatgccgcaatcgccaagtaattacgatccgtacctccaccctgatttagcgaagaagcgccgtgatttagttcttgatgcgcttttgcggaacaataagattacagcaactgaagctgccgaagctaaacaagtcccaattaataccggcttagtggatcaacaaacagtagcgaatagttcaacggattctaaagcaaccgacgcttacgtcaaggaagtcctcgccgacttgaagaaaaaaggctatgatccgtacacggctggtttgaaagtctacaccaatatcaatatggacgcgcaacgtaagttatacgatatcgtcaataatgatagcagtattccattcccagatgatcaactacaaacagcagtttcaattacagatcctaataacggtcgaattgttgcgatgattggtggtcgtaaaactggtgatgtgcagctcggttataaccgggccgtgcaatctggccgaagtaatgggtcatcaatgaaaccattaatggattacggtccagctatcgaatatcttgactactcaaccgcacagaaactacaagatgtcccttacacttatcctggaaccaatattcaattgcataactttgatggccgttatctcggtacaattaccgcgcgtaatgcgcttgccaactcacgaaacgtcccagccatcgaactgttagaagctgttggcatgactaaagcccgtgaattcgtgaaaggcttaggcattaacgtgccagctgatactggtctttcttatgggattggtgggaatgtttcaactgttgatgaagctgccgcatatggcgccttcgcaaacggtggaacttactatgcaccaacttatatccataaagtcgaaacagccgatgggattacgcataattatgattctgatggcacacaggctatgaagagttcaacggcctacatgattactgatatgttaaaagatgttattaaaaatggttctgggacgttagcccaaattccagggcttcatcaagctggtaagactgggacaaccgattattctagcgaagaaattgccaaatctgggttaaacccaactttagcgaaggatagctggtttgccggttataccaagaactattcagtgacggtttggactggatacgatgaaccacttaaaaatggattaacaatgagtgagcggaacgtcgccgcttatatctataaagcaatgatggcctacctcgctcaaaacgcaaccaactcagattggtcaatgccaagtaacgtggttgctaaaaacgtggctggcgtacgagaactctatattaaagggacgacgaccattccaagttcttcaagcagtcgatcttcttcaagtagtgtactctactctagctcagaagcaccggtcagctcaagcagtgaaatttctagctcaagtagcgtggttgaaacaccaagtgaatcttccagtgtgccggagacctcatcttcaagcaccccaactgaaagttcacaatcgcaaccttcgacctcaacccctccggcaacaactaatccaggaacggggtcgacgacacaaacaccagcagcgccaactaactaaaagaagcaccgttcagttcaacgataaacgttggctgaacggtgctttttttgcgttttttaaccacgatcttcaagaaattgttggcctgcttggcaaatccttaataagggacactcatcgcaatgcggcttacgtgccgtacagacttgccgcccaaaaagaatgagtgtgtggtgcgcttgaacccatgttttcttaggaagcttcgcttgaaagtccttttcaatctggatcaccgaggcatcctgtgcactgattttgagccgtttggcaatccgagtgacatgcgtatcgacggcaaatgatgggacgttaaaggcgtcacctaaaacgacattcgcggtcttacggccaacaccagcaagttgttccaattcggcatgtgtgcgcggcacttccccaccaaaatctgccattagttgctggcagcatgttttaatgtgtttagctttattatgatataacccgattgaatgaatatcagcctcaatatcggcaatctctgcattcgcgaaactagctggtgtcgggaaatcagcaaatagttgtggggtgaccttattgacggaaacgtcggtggcttgtgcgctaagcatcaccgcaatcaacaattgaaacggtgaatcagcaactaatgcgccctgcgcatctggaattaaattgtatagttggtgcatggcccactgtgttttggcttttgataacatccgcttcatctcctattcgattaacgtcttggatgggccttttggtaagcttgtagggattctttatcagtaatattttgtttctgccagttgagcaaaatcttatcaacgtacttcaaggaatagacttgatttaaaacggattctcgcacggctaattgaatcaattctggttgataatgatctaaatctaaccagttggcaacaatctcagattccaatggcgataatgggcggccaagagcttgttcaacttggttaaagaccgcactccgttggttaccgtctagtgcttgttgagtgacttgtgcgtcttgaacggctagcacgctcaatttagttaaggctggtgtgagatcgtaatggtcttcagccttaccttgttcattgacagatgatttaagggtaattagttttttctgtaaaagttgatgaatcaatgcgtaaatttggctggattcaattcccatgcgttcaccaatcacagctaaatcgggaaagtcattgttttgactggcaaaatcactgagctgtaagtaaaccactaattcttcagaagacatcttgagcgtttgatagtgatgcagtaacagtcgagagacactcaattggccgccttgtaaaaacgcggtaagttcgttcatattctagccttcttttctaaaagtttcattagttctattgtaaccaattttagacaaataaaaaagcgccgagaacctgatttcggttcacggcgctttagttaatcctcaaagccaactcgtttgagtcagcactctgatttgaaacatgcttttgaaagtagtcctcggtgctttgctacgtccagcaaacgatcgacttgcgtcgctcattcactagactagacaaatgctcgagaactaaccactttcaacgcactctaattcaaacgtgcttttgtagctaggttcctgcgcttaacaatgattgtcaaataatcgattgcatcgattattcgccaaccaacgttaatgctcagaacctaaccagctacaacgcactctatttgaaacgtgcttcttcgaactgccttttccggttaactgtaaaacgggcaccatggctgtgaagcgccataatgcccgttttgctgttaatcctcaaagtcaactcgttcgagtcagcactctttatggtttgattctgttaatcattcttgggaatggaattgtttcacgtaaatgatcgataccacagatccatgtaatggcccgttctagacctaatccgaaaccagaatgtggcactgatccgtaacgacgtaagtctaagtaccattgatattcttcaaggtctaagcccattgctttaatttcagcttctaatttatcaaagtcagtttcacgttcactaccaccgataatttcaccataaccttctggtgccaataaatcagcacataagtaaacatcatcacgtgttggatgtggcttcatatagaaaggtttgatggcttttggataattcaaaatgaagactggttgttcaaattgatccgataaataagtttcatctggtgcgccaaaatcatcgccccatttaatatcgaagtcagctgcttgtaacatttcaacagccttatcgtatgaaatacgtggatacggtgttttagtatatttcttcaattggtcaacatcacggtccaataattttaattcataggcacagtgatcaatgacgttttgaacaaggtaagccacgtatttttcttggacttcaagactttcatcttgagttgtgaaggccatttctggttcaatcatccagaactcagtcaaatgacgacgagttttggatttttcagcacggaaaacaggaccaaaagtgaagactttgccaaaggccattgcgccagcttcagcgtataactgaccactttgtgttaaataagcatcgttgtcgaaatattcgatgtggaataattcagttgtcccttcaggggcactacccgtcaagattggtggatccatcttgatgaagccttcttggttaaagaattcataagaagcgcggatgatttcatttctgattttcatgatcgcaaatgggcgttttgaacgtaaccataagtgacggtgatctaataagaattcaatcccatgttctttaggtgtaattggatattcgctgctgtcaccaattaattcgatgtcagaaatttcaatttcataaccaaagtgtgaacgagtatcttcatgaatgacccctgtcacccacatacttgattcttgtttgacatcttttgccaattggaaaacggcttcgcttacttggcttttaacgacaaccccttggaaaaaggcagtgccatcacgtaattggaggaatgaaatcttcccacttgaacgtttgtcggttaaccaaacgccaattttaacttcttcatcgacatggttttttgcatcgataatactgatttttttaaccataaactctgtctccttatgtgcaacatttaatttacaacagttcaaaataactgatagttattattatataacaaaaccctgacaaccacagccccctaattgagaaccctagatattttcaatcaattgaatcgtcttcccggttttaaaatcgagggttaaataacaaagacggcctttgtcacttttatagacaacttcccaaacaggcttgttgcggtacataccgaagttaatgttcagtactttttgcggatttttaattgaccatgtcttttctaacgcatcgtttttagaaataccaccactttgacgatagacagtggcatgattgcctttttcgttgattaaaacgaagatgccgtgattatcacggtctttaccactaacggtataatatgttgcatttcgatgatacgtgtagaacccatcaggctcttttaatttcgcgtattttttagcaatgttaacggctttggtttcagccgttgcttcgggttttcgagcttgatgataaatcatcagcatgctgccaatgattaccaacaataagaatatccagagccatctcttatatttgcgcacgctgcattctctccttgttcgcttgaataagccttattatagcaaaaaataacggctatcggcgcttaaaaccgaatcttagtgggaatttaaccaaaacaagtcggttaattcccggattattttaaccgacgctgctttttggggcaaacttgtcggtaacgcgcggcgcatttgttgcccatattgggtcgataataaccggggatctaaacaaatgaagacgccgcgatcgttaggggttctgattaagcgcccaaatgcttggcgtagtttaatcgttgcttttggtaaagcctctgctttaaatggattaattccttgggcagaaagttgagcgtaacgaattcgtgtctgcagtgcattcggcgcatcaaatggtaattgaacaagcaccactaattccagtgctgattccggaaaatcaacaccagcaatgaaactgcttgtcgccaacaagattgaatcgtgccccagcataaagcgcttggtaattttctccgcactacccgtaatcccttgggcaagaatctcacgatcaagcgataaaccggcgcggccaagcgcataatacacttgttctaacgcctgattagaattaaagaggactaacgcctgatgcggattgccaactaataacgttaatagctgttcagcaactgcatgatggtactcattgggggctaaattcttttgactaggaccatcttcagcgataaaaaagcgcgcctgtttcttgaagcggaatggactgcgtaatttcttagtcgctagtggttgcgcttcggtaaaaccaagttcacgtttcaaataatcgaagtgcccattaaccgcaagggttgcgccagtcaaggtgactggttcaaagtgcgcgaggatctgttgcatttgcggaccagctgaaagcaattgccactggagcttaaactgtggtaactgactaggttgtttaggctgtgtcatctgaatcattaacgcgtgttgttcctgcggtttcgtcgcaatgaataattgctcaaaccgttgataggcttcaacatccgccaacaataggttgatttcgttttcaaatgactgccaaatccccaaatccccctctgtatattgttctaaccgctgttcaagccagtaacgcaacgcgagaaaatgatcttgaatggtcaacagttggcggttcagttggtcgaattgattatgacaagcggtgacaaattgaaccacttcatctggattcaaataacgttcactaaacgcttgatgcgcttctggttgcggtagttcaaacgctgtggttaggtatgtctctaagtcactgatggttcggcctaacttggttaagtttttatgcactaaccgtaacgagcgggcttgcggtgattttttcgggaaaagccgggctaaattattattggcctgttccggatccgtatattgcaaccctttttgagaccaaagttgccaacgtgaaagtgaccaatcttgttgcgcaattttttgaacattgaaaatcatattttgtgcttcatctaagaccaagtatggtcgcgcaccccaggtttggtgatcattcgcgtgctctgccaggtaggcgtggttggtgacgagtaattcggcttgttgctggcgcttatgcaggcgacgtaagaaatcatcttgataaaacggcgcttgtggttgcagacttgttaatccccggtgttgcacgttattgaaaaatggtgtttggtaactcgttaaattgagttcatccaaatcccccgttgttgtttgggttagccaaactaagattttcatctgaagcaaccgcaccatccgattcttatgtggtaaacggagcgataattcaaagcgatgcaaatccaaatagtgacgcgggctcttaacgatttcggcattaatttggcgacctactaatttttcaagaagcggtctggcctgcgttaaaatctgatcctgtagcagcgttgtcgatgttgcaaccactaatttgtgttcaggcgtcatgcgataactataggggagtaaatacccgatggtcttccctaacccggtggctgcttcaattaatagtggttcaggtgcctcagattcgaaattatcgtgaatcatatccatcatggcagcttgcgctttacgccatttcaagtggggttttaataatcgttttttatcagcttcttccactggataatcagccgcaaaattagatcccggatagatttcaaatgattcctcggctggttttcgtagggcaatgttttcacgaattaagagatcgttcggcagcggtctcgattgcgcatgcatctgctcggcaatcgctgtgaagaaatcccctgtttgacgtaacaagcccgcgcctaacgcactaagacgttctagggtaactaatggcagggtcttcagccgtgccattaattttaagaataatttagccgttaccaaggcatcgctgtcagcttgatgaggattgtcatgttcgatggcgagtaactgtgtgaggtcttgtaatcgatagctcggtgcttccggcaatacgatctgagccagttcaacagtatcgatgcccggcaaatcaagtggcggttgccccacgcgttctaattcgccatttaaaaaaggtaagtcaaagttaatattatgggccacgaaaacagtaccggataagagttcaactaacgttggcgctaaatcttcgaaaatcggtgctaattcgagttgatcagcagtgatatgcgtcaaatgttgaattttagtcggtacgtcgcgaagcggattaacatcttgcgaaatcgtctgaatgattttgccattttgaatgagggcgcatccgaattgaataatgcggtccccttctttaatgtttgtgccagtcgtttctaaatcaacgacggcgtaaattgtctcttggttcatgctgtcaccaatactttactcattattatatcaatcatactatgaatgacgcgtagaaaccagtctagttaatagcgactagttggccaatcgacaatagatagagatatttagcggttaccggccggttagcaatttgcgtcaacgcggcactgtataggttaatttggccggcataccgcgctttaatcgcctcaatggcagcttctggatcagctgggttcacaaaatcagtcttatagtcgaacaaaatacagtcggtatccgtggttacataaccatccataatcccatggattaagacattgtcttgatcttctgggcgtaaaccggcgaataaggatgcagccggtaacaatagtgaaaatgggacttcccgatgaacttgcgctggttcagctaacagttgctgacccaactcgctctcgaagaatgtcatgatagcagcaactttaatttgttgtgcaacattggcagtgaggcttttttgtaaaacaagtcggtcgatgacactttgcacccgatcgatcgttactggttgggttaaatcgatttcttgtaagaccagatgcgtcgccgttccaatttcagccggactcgcttttcgaacagtctgcatgaattgtggttgaggtaattcatcggtcacgtaacgatgggtttgttgcggtgtatcagcgtcaaagcgtaattgccccaactgatcattgtcgggatcttcaaagagccgtttcacttctgaaacagactggtaagctgtcgttttggtggcgccttttgctggataactgaatgttagctggtcttgaatcccgttggctaaatcagttgttaaatcgaccgccttgagtgccacttgttgttgctggctccaatcttgatcatggtgtaaagcacctggtaattcgccaaggcgcgtttcacttgtaaacgttaaattaaattcagttgcgtcatcgctcagaggtaggaatggtgtcccctcttcggtccaatcacgggcttgcggatgacgaattaagctcaatccaatccaatctagtaagttcgtgctagcttgacgaacagaagcgtccaaccgcagatcaggattttgctgtcctttttgccaagttgcaaatagtttcgcttggttatcacaactgcccgcgataatcagccgttgctcggcacgcgttaaagcaacatagagttttcgcatttcttcagcgcgtaacttttgccgtttttgggtcgtgatggttaattctggtagtgttggaatctttaaccgttttttcgcgtctaagtaaacaattccgagtcccgattgatcatcgagcacgtaattttggcgcaagtcttgctcgttaaattgatgattggcatccattagaaagaccaccgggaattctaagcctttactcccatgaatcgtcatcacagagatggcatcttgattggcgagactggttggttgggctaaatccttatcttgtttttgcaaacgttcgataaattggatgaactggaagagccctttaaagccgtttgcttcgtaagtcgcagcgcgttcatagagtgcgtgcaagtttgcttggcgttggcgacctgctggcatcccaccggcgtaatctaaaaagccggtcttttggtaaattgtccagattaaatcaacgagtggccgttgacgtgcaatggctcgtaactcatttaataaggtttggaaatgcgttaatttttcgaagacttgttggccgagttggccggatttttgtgcttcgaactgatcaagataattaaaaacggcttggtaatagtcatccgttttatcattaatccggattaatgcgagttcattttcgttcataccgacaattggtgaccgaagcacgctaaccagtggaatatcttgattgggattatcaataattttcaagaaagatagcatgatttgaatttccgttgtttggaaataattctgcgcatcactaatgacaatcggtaagccgaaccgttggaaataatcaagaatgattaggttgttgttgcgcgttggcgtcaataagacaatatcttgatagcgaattggccggatttcttgcgtatcccgatcccagatggtttcttgattatcaatcattcgtttaattcgctgtgcaactgatgcaatctgaccttcagctttatcaagcttgcccgttgattcttcatcagtcggttttgtttcgtataaaagtaattcagttggctgagttggttgatcgtcaggataataagtcgcaccatattgcaattcagcgttgtgatcgtaatctagctgccctaattggcggtccatgatttgtttaaagactaagttgacgaaatcatcgatattacgccgtgaacggaagttttctgcgagaataatgcgttcactatcgttatctggcttggcgaattcgtcgtacttaccgaggaacaaactcggatcagctaatcgaaaggcatagatggattgtttaacatcccccaccatgaagacgttgcggggtgcttgactagcgatagtttgaatgattgtttcttgtaactggtttgtatcttgatattcatcaaccaggatttcactgaatttattttgatagaacgttcgtgctgcctctgattccggagtgtcaccggccaaaatatccaaacagaaatgttctaaatcgccaaaatctagtaaatagcggcgtttcttctcagcttggaaggcttgcttaaaatcgcgggtaaccgtcactaacttaccgactaactcaccagcgcgccgttgaatctgactggtttgtgcttcgtcaaagacaaaataggttgttaaaagatcgtttagtgcccctttgacattatcgagggcgtttttgatccggtccttgtcatattgttcatcgggttctaatttcttagttcgtttggcgggtcccaattgggcgtcggtcaattgtgtgcgccactgcgcccaacttaaagtggccgcgttggcttgaatggcagttagtgctgcttgtgccgttgcgatagttggcaagtataccgcaaatttctcgtttgtttgacttagttcgttggcgagtgccaagtcttttaaacaggttgccaaggtcgcttctaactttggcagaatcgttgttttgaaataagcactggttgttaggccagtctctggtacctcgtaaggggcggttagagattgtaaccattcatcgggcgctggattggcaccagagaagttaaacagttcgaaaacaatgttggttagcccatcatcgttgcgatcgttcgaaaaattttgcgctaaatcataaaataaggcgtcgtttgactggtaatgttcttcgcgaacgcgttgccaaacttgatcctctaataagagacgttccgcagtatcacttaataaccgaaacgcgggatctaacttaatcacgtagtagaaatgtttaatgacttgtaagcaaaacgcatgcaacgtgctgatttgtgcggtcgggactaggctgagttgctgccgtaagcgttgttgcaccgctttgtcggttgcctcgcttgctttttttcgcagtgccgtttgaatccgttggcgcatttcagatgcggcggcttcggtaaacgtcaccaccaatagtgaatccacatcagtgccattcaagattttttgaatcacgcgttcaactaaaacggttgtcttcccggagcccgccgaggcagaaacgaggatatcatgccccgcgtgatcaacggctgcttgttgggttggtgtaaatcggcgatcactcatgtcgttcttcctccgagttcataattttggctaagacggcttgattatcaagcgcacttaattggcgataattattttctggtaacatcgcatcgaattggaaaatcgatttatatggcgacattgtgagtgcattcgtgcggtcgggccgcataatcggattcaaagcattttcgccagcaaaaatcgcttcccccgctgctttgattagttgatcgttatgggcaattaattgctgtaactcatcaagggtgaccagttgtttcgatttgaatgccccactctttggacgattgaagttaaacagtggtgaatagccactttctaaagctgtatccaagttttcgagtaaggtctcatcgtttaaaattaagccatcatacttaaattgatccagtaataattgatcgagttcgcctttttgtagttgagcgagtttttgtttgttcagttgcttcaatgacattgttgggttttgaaggtgcagataaaaggccccggcaggttttaccttgctttgcgctggtaaaattgctgcttgatcttgcaagacagtttcaaggtatgtcaacatttgcaatgccaaaccatagtatgcatcgcggaagctaaagctgtgttgactggatttgtaatcaacaattcccaggtaggcttggtcgtttaatgtcagttgatcgatccggtcaattttcccccgcaccttaacccgacgttgattgggtaattcgaattctagaccagctaatccttgttgggcaccaacttggccgaataagacttcggttgccaacggttttaagttcgttcgttgactctgatcgcgcaatgtccggctgacgcgtttaattgtttgactcaattgttggcgaatgtagcccattcgtgctgatttattgaggatcttaaattctggttgttcatacgctttttgtaagatttcatccgtcaatgcatcgatttgttgattatcgagatcgggtaagactaagcgttgggcttgaatcatcttgataaattgatctaagacttggtggtagaaatcaccggtatttgcaggtgtcagttcaaaaattgggcgctcgttcagttttaagccgtattttaagaaataagcgtattgattttgatagaactcttctaatttcgagatcgacgtatggatttcattgccatataacccagtgacaatatcgcttgtcagtgcaacgggttggttatggtacgccagactttgaaggagttgattggttaagtagtgactaacaggaaattgttgtaataaacgataaacagtctgccattggtcaggaattagtgtttgcgtcgcttgtgcttgtcgcgcaacttgaatcaaatcgcttaacaaactacgccaagaacccgtaattggcgctgtacttgtcggaatgacttctgctagaacgcgttgctcggttaaatggaagtagtttttaatccggtcgacatagggggataccgtgtagttcgccccttccccattattcaatggataagtgaaatacaatccttcagtaccacttaaaaaggccaagtagttcagataaggttcaaagctcatctgactggcacttggatcagttaagaattgttctgaattgaaccgatcggttaatagttgccgatcatggtcggataataaggcgctggtttcaatctgatcaggcatcacttgatcggtcgcaccaatcataaaggtaattttgcggcgtttagtctgcaccatccctgattcagataaaacgacctggtcgagtgtcgatggaatttgcgcatattgcgccgtattaaacccggccgctagtaaatcccaaaagccctttagttcgaaaggttggtcgcctaataacgtcacatattcatccaacatcgtcataaatgtttgccatgtctgttccggttggccagctaaggcaatttgattggctgcgagtgcttggtcccgccaatttaacaattgtcgatcgacaccttgttcgattaagaattgatagagcactttagcggcatcgcgccctgttttggcactgtctaaccgtttataaaatggtggtaatacggattgaacataatgccgaatccgattgatccgttccgtgagcacttcatcttctgttgttcgaacaccatcttggaaggaaccgaaccgataatattgccaatcggctgcgcttaaccaatcatgcccttcatacccactttttaaaatcagattttcacacaaatcaagatcagcccggaattcagcgactgattgatagtcatctggtattaaaagctccgtcttcaaaagcgccattacatcttcatagcggtagtaatgctctttcacatcaaacaacgctgccaacatcgcaacaagtggatgggccgccattgtttccggtaaatcgcagaagtacggcacttcgtattctgtaaaaatcggcgcaatcattgtttcataaggggctaaatgccgagtcataatcaagaagtctcggtagcgatagtggccggtttggactaaacgacgaatttcacgggcaacataccgtaattcggtataccgattttcggcaccgatcacttgaagttgcgtcgaatcgatttccggtgctgttgggatctgaccgtggttttcagaagcaacccagtaccgatcaagcgcgagtaacgttggtgaaacccgctggttagtggcaatctgatcagtcatgatgggaatgtgattttgcttggcctgttggtataattgataatacgtacgctcagcttgataaaagaagctgagtttttccggtggttgttggtaattaacatagtcggtaattaaggctacggttaagcttgcttgctgcattaagacggcgactagcgcttgttcttgagccgtgaattgtgcgaaaccttcgatatagaaatgacaatcgtgtaagtcttgtttttttaaataatcagttaaggcatcaattaacgtcgtattttcgatgaattgcttttgcatagcggcttcaaacgccgtggcaataatggttatttcccgcaatttagtagtcagttcgacttcttcgggcgctagctgggccgcaatctcagttagctcatcgggtgtaatacagcccactttaagttccaatagttggctcgttaattgagcaacaaagcctgtttgattgacttccccaccaaataagctgagttcttctgcatgttcttgcaagaggcggtagacaaggatgtttaacccggcggttgaaatccgcggaatctggtagtacggggtatttttcatgaaataccaagctaatcgacttaatgagaagacttggacgcgtgaggttgcgacatactcacttccaggggtttttaggtcatttaaaagtgcgacttcagattcaaatttgatatgattcgggaccaaataaaaaaagcggtccgtgttggtggccttaaggtctgtttgtagttgcttgactagtgtttgatggtggtcataactagctgtaccaataataaattttaagctcatggcgcccacactcctttggcgtcattttaccatagatagacaagtgattgggataaaatccggctagtccgttggtaaaaagcgggtataataggaaacccattaacctgtgcccaatttgatttatgtggcggtcatttttgttttgcagtatagtagtaagggtatcttcaagtcagaaaaagagattaagggtgattgtatgcagactggtgttggccaaagtcatgcgaaaattattttaattggggaacacgctgtcgtttatggacaacctgcgattgccctccccatctttgcggttcaagcgcgggtaacggtaactctcgagccggcactccagacaccgcaaattaagagtacttattacaatggtcctctagaacaggctgttggtcagatgcaaggcattcgccggttaattgaacaactgtggcatgcattagatccgaacttaaccccgtttgaattgacgattgaaagtgacttaccgcccgaacgcgggatgggttcttcagccgcaacggccgtcgccatcattcgagcgttatttgcgacttatcatcaagagctcagtcaacaacggctgctaaagctagccgcgctctccgaaaatttaatccacggtaatccaagcgggattgacgccgcaacaaccggcgcaactacaccattatggtttgtcaaagggcagccgcttcaacccctacccattaatttaaaagggtatctcgtaatcgccgacagcggtcaaaaggggcaaacaggtgccgccgtcaaaagcgttcagaatcaaatgatgtccaatccagaacaaacgcaacccttaattgaccatttgggttatctaacgcaacaagtcgcaagaaatattgcccaaaacgaattaacggtacttggcgcgaacctcaaccgtgctcaacttgatttgcgggcactcggtgtcagcaatgcccgtgttgatcatttgattgatgtggctaatcagaccggtagtttgggcactaagttaacgggtggtggccgtggtggctgcattatcgccctggccgctacgcaaagtgctgcggatgatttggcacaagccttatcagcagctggtgccatcaaaacttggattcaaccactacacgcactttaaaaaagattaggagtattactatgggacaatcaattacagccagagcacatacgaatattgcgctcattaagtattggggaaaacaaaatccggaattgattattccgtataacagtagtctttcaatgacgctagatcatttttatacagatacaacggtccgcttttcaactgatttgactgctgaccaaattagctttaatggtgccattgcggataccaaaactagtacgcagatgagtcagtttctcgatttaattcgaaaacaggcgcatctgcctttatttgctgctgtggaaaccattaatcatgtccccaatgctgctgggttggcctcttctgcttccggttatgcggcattagctgctgcaggtagtcgtgcagctgggcttgaacttaacgatcgggatctttcgagattagcccgccgtggttctggctctgcaacccgctcgatttatggtggttttgtggaatggcaacgtgggaccaatgatttggattcatacgctgttcccgttcaagaaacagttgattgggacatccagatgattgcgattgtcttaaatgatcgtcaaaaagccatcgccagtcgtgctgggatggcgaatacggtggccacgtcgccctactacccagcatgggttgaaaccgctcaagccgcaattccggcaatgaaggccgcaatcgttaagaaagatataaatttggtggggcaattagcagaacaaagtgcgatgcagatgcatgcgacaacccttagtgccgtcccacctttcacctattttgaacctgaaaccctacaagcaattaaagtcgtgcagaccttgcgccaacagggtgtttcttgctattatactatggatgctggtccaaacgtgaaagtgatttgtaccagtcaggaaacacctcagattttagcggcgcttgcgccctattttagtcctgaacaactccttgttgctaaaccaggtcctggtgtgagctatcgataatgcaaatttaagttaaacgtgaaaggttctgatggtttgataacggctaaagcgcccggaaagctgtatattgctggcgaatacgcagtagtagaaacaggttttccggctattatcgtggctttaaatcaatttgtgacagtcacaattgaagagagtcatgaatatgggagtattgtgtctaaacaataccaagaaaattccctttattggcaacgacaaggtgatgaaatggtttttgataaccgcgataatcccttccattatattttgtccgcgattcgcttaacggaacaatacgcacgtcaagcgggtaagacattgcgcgtctaccacctacgggtaaatagtgatttagactctgctgatggtaaaaaatacggtttaggcagttcagccgccgtaaccgttgcaacggtaaaagctctctgcgccttttatgaattatcactatcaaacgaccaattgtataaacttgctgctattgcgcatttagatgtgcagggcaacggttctttaggcgacattgctgctagtgtttttggtggctgggtcgcttatcggtcatttgataaacaatggcttgctgacattcgaccaactgttagtctaacggagctgctcgaaatgccatggcctagtctttcaatcgaattattaacaccgccagcagagttgtcactcttgattggttggacggggtcgcccgcttcaacctcgcacttggtggataaaattgcccttgctaaaacagaacggcaagccgattatcaaaacttcctcgcagctagcaaagcttgcttagaagcgatggtcgaagggtttcgtcgtaatgatttagcccagatccaagctgaattacgccacaatcgtgccattttacaagatctcgctcacttcagtcacgtcgctattgaaacgccaatattacagaaaatgggcgcattagccgaggcaatcggcggtgctgccaaaacatctggtgctggcggtggtgattgtgggattgtcattattgatcgcgctatcgaaacagaggccctctttgaacaatggcgggccaatcaaattgaacgattgaaccttgcagttcacctcgtagattaggagcttacccatggtcagacccaaacaatccattcaatctcatcggaaagatgaacatgtctttttagcggaaaaattccgccatgatgatgccatcaatgactttgatggaattcggtttatccatcaaagcttacccgaaattgcggtatccgacgtggatatcagtaccgattttgccgggactaaccgggccagtcccttttatatcaacggcatgaccggtggtagtcagcagacaaagaaaattaacgcacaattagcgcaagtcgcccaaattaccaacctaccaatggcaactggctcccaatcggtagccattaaagatccgtcactagcggatacatttagcgtgattcgcgaattcaatccccacgggtttgtactcgctaatattggtgctggtaatgatttgaatgtggctaagcaagccgttgcaatgacccaagccaatgccctagaaattcacgtcaacacgccacaagaaattgtcatgcctgaaggtgatcaagatttctactggttagacgagattgctaacattgtcgccaatgttggtgtgcccgttatcgtgaaagaagttggttttgggatgagtgctgatacaatcgcgcaactcaagcaaatcggtgtgcaattcatcgatgtttctggccgtggcgggaccaactttgtcacaatcgaaaacgaacggcgtcatgataaagcctacgattacttagctgattggggccaatcaacggtcgaatcgctctttgaatcacgcgctttccaaaatgacgtcaatatcctcgcttcaggtgggattcggaatcccctagatatcgttaaagcacttcgacttggtgccagtgctgttgggatttccggtcaattcttgcacatggttttaaaagaaggcccgacacaaatggcggaaaacttgctcacttggcaagcgcagattcaagagattatggcaatgcttggcgcacgcgatattcaagcgctccaaaaggcgccaattattctctcgcctgaattacggcattatttgaatgaacggcacataacattttaagcagcaaaagcccggtagaaggatttcttctaccgggctttatttgattgcttaattagcaactacgactttgccaatcatttggttcgtttcgaccagttgatgcgcttgccgtaagttggctgctgaaattgggcttaagcactttgtcagggttgattgcaatttgttttgttccaataaggttgcaatctgtcctaagataatgccttgactcgctaaatccgttgtttgatagtaggtctttgagaaaacccactcccaagcgaactcgacccgttttttagttaatttttgtaaatcgaccgggcgatgattttcagtgattgaagcgatgcggccattgggcttaatcaggcgcgccatactctcccagtgttgatcgatgttattcaactctaatatataatcgaccgtttgatagccgagtgcgtgcacctgttcaatgagtgattgatgatggttaacgacttgatccgcaccatgggccagcgcccacttttgcgtttccggacgggaggcagtcgcaatcacgtgcaatccggccaaatgtgccagttgggtggcgatcgaaccaaccccacctgccccattaatgattaggatggtttgatcatgattagtggttcgatcttcaaaatcaatgtgtaatttctcaaataaagcttcccaagccgtcagcgctgtgagcggcatcgcggcagcttgcgcgtccgttaaattctgcggtgcttttgcgacgattcgttcatccactaattgatattcgctattactacctggtcgtttaaagtccccaacataaaagacacgatcacccggtttaaataacgtgacggcattgccaattcctgtgacaatcccaacagcgtcccagccaagaatacggggcgtttttgattgtcctctacccccttttcgaatgccaacatctacagggttaactgaaacagcggtcacttgtacgcataaatcgtgtggttttggtttgggactggggagattaaaagccattaaactttcttcatttgtaatcggtaaatgtttggtaaaaccaattgcttgcattaaaaatgccttctttcttattcaccattagtctaaaacattaattgccccgtaacaatcgtgtatcgaatgtaactagttacattgttttcactaggcaaatgactgctagcggactataatggcggtatcaaaggaggccatttcatggttcaagaacggcacatttatgattgtcaggcgggctgcccggttgaaagcacgcttcaaattatctcgggtaaatggaaaagtgtgattatttatcaacttttgcaacattcaaatctccattttgatgatttgacgcgcgctttacccgattgttcgcgccgcatgttagccctacagctggaagaattaattgcggatcatgtgattactaaaacggtgattagtctccggccgttaaagactgaataccaactctctgaatttggtcaaacactgagtcccgtgattaacgcaatggcaacttggggaacttattataatcaggttgcacaacaggatgttggatactgtaatttgcagtaatgcctaaatttggatattcggtagattgtaaaattaatccgaacgctgttcggacaaaaaagatcagcttcctttaaaatggtgtttaccacaaacccatcttttaggagctgatcttttgtctagtataacctattccgaacgaattaaaatcgaaatcttttgtgaactagggctgtccaatatccaaatgggcgttcggctgaaccgatcaccgtcaacaatttcttatgaattatctcgatgtcaaccttatcaggctgaattagcacaaacagatgccgaatacacgcgatcacgatgtggtcggaaaactaagctgagcgatgagttaaagcaaaaaattctcaaccatttacgtctaagctggtcaccaggaatgattgctcacgaatttaaactagctactaaatctatttataattggctaaatcaggggagaattggtttctccttgaatgatctacctgaacatggcgtacgccaacggcgtaacgttgaccaacgatccaaatataatcaatctttggggcgatcaattgaacagcgtcccatgatgattaatcaacgtaagcgcatcggcgattttgaactagatacagtcgttggtcctcgtgggcatagtaaggcagttttattaactttaatcgatcgcaaatcacggttcctttgggcataccggttaaaagatcggacgacagcgactgttaatgaagtactaactaagttcctaaccacttttaatggtccggtgcacagctttactgtggaccgtggcactgagtttagtgggctagtatcacttgaatcacaatatggtattaagacctattactgccatgcttatacgccagctgaacgtggtagtaatgaacgctttaatcggaatttacgttatttttatcctaaagggactcgttttgagcacattagtgctcaagatttaacgacgacgttactccaaattaaccagcgaccgcttaaaatactcgactggcaaacaccgtatcaggtgatgctgacaaatttgtccaaaaattcggattaaatttgcaatctaccattcgctaaagcacttgacaaattaacttggataatgtaaaaatatagttgttaaaagtataagtaaactttgataatgaagtggtgcatattgaaagaaacgaattatgtcgaaaataaagtctatgaataccgagtactccaacatctttctcaagaaaaattaggtcaagcggttggtgtttccaagcaaaccatctatgcaatggaaaaaggcaactactcacctagtttgattttagcctttaagctcgcacgattttttgatgtaccaattgacgttctattcacttatcgggaggcgtaacaatatggcccctactacactttttaaatcaaaatgcccatgtaatcgctggtgtggcaatcggattaatcatcatttcaattctgtttttctactatggtataactagaattggacgttcggatgaacgctcacagcttattatgtatcgcgtttttaaaacgatgtttgcagcgtgtttattatcgatgattttatttatgacttttgtgccagaccgcttaacagcagttcgagattggtttacaactctattcagtcttgtatttatcagtggcgcatgcgctgtttttattgaaccacggcgtaaagtttaacccttaaaaaaaaacggtttagtcaatctaatgactaaaccgtttttttaatatgttgtttttcgtccttttggaattaaataataaaagataccgattaagatgagatcaatgatcatcaatccaataaaaatcgctgttcgacccgttaggtaaaagaaccaactaccaattgagaagccaatgattgagctaacaactaggtgcagcgcaaaaatttgggtttgtgccacgcggaatttacgatataaaccagtgctgagccctttttgtgcgtgataaccattgataacttggctaaataaataagtgaaaccgaccgcgatgatcatgaggacggcaattaccgcgattacacccgcattttgacggagccagttgacgccgactaacggcgtcgtcttcggtgttaaataactgtgcttagtcgttttgaaaatcttttggtaagttttcagatgcgctcccatctgcggaccatcaaccaatacggtgactttattcagtgggcgatcatttaatacaaattctggtgacgtggatacaaaaatgtgctgatcaagcgtagttgtctgattcgtaccgacaacgccaatcacggataagtagcgaccatgatcttgataatacgcttgactagctggtttgtagagttcagcaagtcgtgattgaccagcaacgacgactggaatctgtgatttgaaatcgtaactggagaagaaccggccgtcttttaatgggacactcgataacttccctttcgcatagacatatgagaaccgggaatcaacgttgaattgaatttgaaaatggcttaatttcgcggcatcaattttttgaatggttttttgaatcgactgttgactcttagaattaaaaatcacagcattttctgataaactattgtgatttaagcgttggctatagttagtttttgcacgttggctaatcgttaacatgcctagaactgttaaaccaactagtaaacaatctaatattatttttttcaggcgcacagtgggccctcctttaaagcagactattgaatccagtaaaaccgatcacgcattaaatcgaatgggcgtaagtaacggttaatccgtgataaacgggcgtcgttgtgataatgggccgccgtccaaaaggcgtgactattcgtggcgccaaaacgttcgcctaagcacaacaaaacgggggcatttggcattgcacgaagttgttgcagcaattcataatcaactgggacgccgttgggtgaccaggacattaagactgcatcgacttgcggaccatattttgggaccgcttgtttggcgtcaagagctgccactgacgtgactaattggcgccctgtttcattctcggcagtccaggctaaactatcggtacaaatcacatcagcgcctgcctgccgtaaaccagcacttaaatagccgttaccagccatgacttctagaaaacgccaattgggaaactcgcggacaatcgccgccgtcaaatctgtagtgatataggcccacatgccaaagcgattttgcaaatattcacggtaattgcgcagtaagtggtcgattaactgtaactgacgttgaacctcagccacactagcggcgctaaaagccccctgttcagcctggagtaatatttctaaatacagagattcatcaattcccaaaacgggtaaattatgtatgggcaagccgtcctgttcaatctgcaataaactagttaaaacagcatgaatttgtacttgaatggctgggacggttgcaaaaaaacgttgactctggcgcaatttctctggataacttaactgtatcataatggattccgtttctaatataagtttctcttaaacgattagaaaaaccttcccaatcggaaggccaaatcgaacgttttaacgaatcccgagtgcaatgcgtgcataacgggacatcttgctggtatcccacgctgggtaccagacgagattgactttaacttcattgacttctggaattttgcccattgcttgatgaatcgaatccgttaaaacatcggttaagggacagcccatcgttgtaagggtcatatcaatcgtacataagccattttcatccaggtttaaaccgtaaaccaagccgagattcacaatgtcaatcccgagttctggatcaatcacggtctcgagcgcggctagaatccgttcctttaagtcttcaattgctgcatcatcttgtggttggtctgccatgtgtcctgcctcctggtcactctaatagctctattatactggttcaaccgaccagttacaactgacgatcattgacaacaatccgcataccccctagaataaaaagacatatcgtgttttaaccaaacacgtttttaaaaggaggcgccgctatgcatcaaaaattgattgcactggatttagatgggactaccctcaattcagatgcccaaattacacttaaaacgcaacaaactttaactgaattacaaaacgctggccacattgtcagtattgtcacagggcgcccaaatcgtttgagtgaacctttctaccaacaattaggtttaacgtcgccaatggttaactttaatggggctttaatgcacattccgggacaagcctgggccggtgaatatcaatatacgattaataaagacattgtctttagtctcttccaactaaaagaacgctttaagattcaaatgattgccgccgaaggtaaaacgatgtttttagctgatcaagcttatgccaacacgttttctttcttccccacaacgttgaagtccgatgaaattttaacccgcgaatcgcttcggcaagacccagcggccgtcacggtttttgtggaacgcgctgatcaagatgcgttacgtgctgaaattctgcgccaattccctgacgtttccgtcaacacttggggtggtcctgctagcgtcttagaaattgtgcatcatgggattcacaaagcaaccggcctcgcaaaactagcggcacactacgacattgatcaatcagatatcattgcctttggtgatgaaagtaatgatttggatatgttagcctatgccggtaccggggttgcgatgcaaaacgcaattgcaccgatcaaggcgattgcagacgacatcacaccactgacgaatgcgcaagatggtgtggtcaattatttacggcaatattttaagatggattaatgaaaaagcgattcgacaatttctggtcgaatcgctttttttgatggatgaaacgtgcttttcaagctaactttctgtgcttagctacatccgtcaaatcaccgattttgtcggtaatctgcctgattaggctaatcctcagaagatacccggcttattgcacactctattctgaaacgtgctccgtcagatatacacttccggttagttacataccgcaaacgatcggctacgccgctcattcacggtattagactaatcctcagcgtatgaccatctgacgtcgcactctatttttcgtcgctctttagcacgccgcctactgagtagcggtctggttgcatttcgtttaggacaacgtgcacgtgttctgcaggtgcgcctgtgtttttagtgattgcttctgtgacgtctgcacagagttgttttaattgtgcttggctccggccagcgattaaatcgatgtgtactaatggcatgtgtggtgcctcctttaattgaatacttatattatgcctgttttaacgcaattgagcaacggtaattactgtgtttttaagcaaaagaatgtataataatagctaatattgatttatctatggaggcattacaatgagtgaacccctttaccgtcaattgacggcctgtaccagtgttttagttggtaagaaagccactgcagacggctcaactttaatcgcacgtaacgaagatagccaggcagcttggcctaaacatttaaccatccatccccatcaaaagttaacgactgccccgcactttgtctcaaaagacacgggtttttcaatcgatttaccacttgaagccgcaaaatacacggcgacacccgaatggaccgatgaatatggactattcgaagaagacggcattaacgaatacggcgttgcgatgagcggcaccgaaagtgcttatagcaacagtcgcgctctcggctttgacccctacatcgacaacgggattgctgaagaagccatgattacagtcgtcttaccttacgtgaaaacggcccgtgaaggtgttgcgcggctaggcgccatcgttagtgaatacggcaccactgaaagtaacgggattctcttttccgatgtcgatgaggtctggtatcttgaaatcggcagtggacatcactgggttgcccaacggattccggatgatagctatgccgtggttgccaatcaacttgcgattcaagaagtgcaattcgatcaaccggattggttcatgacttcagaggggattcaagattttgcgcgtgataatcacctatggcaagctgatacgccatttaacttccgcgatatctttgggaccaaagaccaaagtgaccttgtttacaacacaccgcgcgtttggtacggtcaaaaattgttaacgccatctgtcacccaacaacctcaagactttaacctccccttcttacgacaagccgatgcgcccattcaagtcgaagatgtcgcgcgaattctaggctcgcattatgaaggcacggtctacgatccaatcggtcacggcacaccacaagaaaaacatgctttccgcccaattagtttagcaaagacgcaagaatcacacattctccaaatgcgccctaacttaccggttgatgttagcggtattcattggttatcaatgggtgtcacggcgcaaagtgtttacgtcccattctatgccggtgccgatgacgtcccagtcaattaccaaaaagggacaaaggattacagtcaagattcgatctactggacctataaattagctggtattttggtggatgcacactacgccaagttcgccaaggacttggaacaaacgcaaaaacacatcaatagtttgatggttcaaaacatcgtggcaactgatcaagcggttgctgctgaaactgatgcacaccaacgaaccctgttgatgaccaaaggttctgctaaggctgcacaactcgcacaacacgaaatggaacgcctcaccgcaaaactgattacggatagcgcgaacctatcaccactcaactttacaacggatagtaatttatagataaaaatggtcccacatcgtattttgatgtgggaccattttatttactcagcaatcatctctctaatcttgtaagttccacttgcgtatctaacttctacccgataaggatgtccatggacaactgatttagaaggagtaaatacatttccatttagggaaccatagtagttttggccattggtgacttctgccagatagctgttgtttcctaatacgactatcttataatgcttaaataattcgttagcaaaggtaacgacgattttattatttttaacactcatgtcagcaactaaagtgttcaagaacagttgctgtgcatggttaattctttgagtcaatatcgtcttttccgagcccttaactgcgttaatttgtgttcgtaattgatctaataggtcttgtgtgacctcagatttcaactgatcgtttgtttcaaataacgcttcaacttgacgtttcagaagaagaatatcctgactaatcattttgagaatgtaagacttgtgcggtaattcagccactacggtaacaacatgtgcatccgcttggttaggaattgttaagacattatcgtcgagctgaccaccactactgataccatttttgacctctgcaactggttggtcgtcaacaagtaccttaattttcgcatagtctttaaacttctcatcagtaaacgataccactaatgctgattgtgaatccagttgaatatctttgactaatgtagctaggtatttgtcttctaattttgtaaatagttctaagagtttttctttatagtcaaaagtagaaggaagagcatcaattcgatttcggagagcatctagtttagcttgggttagaattgtaccaatcggttctgatgcattcaaatagtttaataactcttcttcaagtgcaatactatcaattgagtgttcatatcgtttaaaagtaccatttttattttgctgttcaattgtaatcacatcagtcggtttaagcatctcgattgtttcccaaacattatttgttaacatactttcaattggctctttattgacgagtttggaaatcacttgtccattctttttaaggattaattgctcatccttaaatacatcggtttggtagtcagtcaggttaacttgaataccgtggtcattcagcgatacggtgtcgattaagcgcatgggtaactgtttattagtttctttatcatttaaccaaatagcttctggtaaaggtgctaattgactaatttcagctttaactgctgcggaaatatcaaatccccattgttcgaaataaggctgcatattataacccgtaattctagaaacatttagaacaaagttttgcatccgttcattgtctggtccaaatgcaagcttgttttcacgatagtactgatgtaaaacggggtaaaagttatcaccaaatgtatttcctaattgaccaaacataaccatctttaaattattattttgtgcgttgaattgcttattatcagattttagataagtatgcatttctgggtagtattgatctaacgatgtcattttaccagtcaattctttttgagccgctaatgcataaatgttaacacttgattctacaacagcaccccatttccaaggtgtttgttgtctctgatgaccactttcatgccagatgctccaaccttcatttgtcttcagtagtcgttgcaaagcgcgatcattatggaagcccataaattcattttctgtatacatatacaacttaggtgactctaagaaatgttggagatggcgatcaacaaagtttactggatttccttcagtagtaatgcctgaaacccgatcttgtgccgttaaaaaccgatcataataggtcatcagttctttagggtcaccgagatattttttagccattgcgtaactaactgtaattaatgctttgttactgaccaactgcacatctttagcattcgtcatttccgccatttgtttctcaaagtctgcgacgctagtttgatttaaatcgaaatatggcattgatcctgttgcccctgatattgtgattgttgcttcaccagaatcattaggattagtcacataaatcgggccctcgttttcaacggtaatcgttgtaatgccctttgttaatggatattgtttttgattttctcgttcgggcgaaccaattgtgatagataatgaatcttgcatcccctgagcaactgtcaaaacatcccctttttgggcgtataaaccgctaggctctaaacttgagtagcgtaatgttctgcgttgccggtctttttctttaaaaacatcaccacgaccaatataggttttcatttcttgtggtgcttttagattttgctggtgcctcaccttggatttgaggctatctgctagcacgctactcgctaaattttggtgattgtcacttggttcagccttaactgtttgtatagaactgatggtgctagttgttaggattcctaacgctaaaattccgattacattcttgatagtctcatcccctaaaagtattattatttttataacatattcagattagcatggactgctgaaaattgtctattaaaaaaccctaatgatttctataattattctattaatattaaaaatgtcaataatgataactacaactattacatttaagaataaatcgctctataattgtgatgacagtgtttacaattgtgtaaaataaaataagacccaccacttattaagtgatgggtcttattttattcagttataaatgtattataatgaacacccttattaaagtaattccgctaccaatggccaattgatcatcttccaaaagttttcgatgtaatcaatccggttattctggtatttcaggtagtacgcatgttcccaaacgtcaagtccaagtagtggtcgattacgactcataagtggtgaatcttgattaggcgttgtcatgatttgtagttcaccattttgatcgataacaagccatgcccagccagagccaaatacaccaagggcagcttcggtgaatgcttcttggaacgtcttaaacttcccaaagcgggcttcaatccgttcgagtaattcccccgttggtgcttctggcgcattcggtgttagaattcgccagaagaaactatgattggcatggcccccagcattattgcggacaggtgcttgaagattctcaggtaaatcatcgatgtgtgttaacaaatcatgtaatgatttacctgctaaatcggggtgcttggctagcgccgcgttgagttttgttacataagtcttatgatgtttgtcatgatgcagatgcattgtttcagaatcgatatacggctctaaggccacatattcataaggtagtgctggtaatttaaatgtcattgttcaccctccttgttataacctcatcatacaagtctatggcgttaaaaagcgaataatatgattctacgaccattgaaaaaagctgactaatgtttattagccaactttttttgaatcctgggtagctgcgtatcgatttctgccaacatcatgttcggtgtcttatgttggaaaaaaatggtgtagtccgcaagccgataatactttggtcgtcgtttgtgatacagttcgcgtaaaccatcgtggcccaattgattcacaagtggccgccgatcattgcgcgaaacgcggcgccaatgtgcttcataactcccatttaggaaaaaaatggggatatgactctgttcaagtaaatggcgcgtctgagcatcatccacgaccccgccgccggttgcgataatcccatcgtgttggatcaatgtctgtaaggcctcaaattccatttgtcgaaatgcagcctgccctttttcggcaaagatttcgttaatcgtcatttgctgttcttgcatgatgtagcgatccaaatcaatccagtcacaatggtaatgatgtgcaactttgcgtgcaatggtcgttttaccagaccccataaaaccgattaaaatcagttgcatctagtcaatcaacccctatggttctatttcaaatatattgttggttccaagactgctccgcacatacggtcagttaaacactctttacaagttagtttcattgtaaggtatctgtgggttggttaccagtttttttttgaaaatagattagccgctaaagtcgttagtggtatggattgaatttttggaacaccaattgcatcgaggtaaacaagattaatggcatctccttgattcttcttatcatgtaaaagttgcgtgaagagtcgatcactcataagtaacgggctatctgtcggcaagccgaccgcatttaaaacagttgtaatcactggtgttaaatgcgcttcagtcagtccactttgttcgactaagtgctgcatggcaactaacccgatgctgaccgcttcaccgtgcatcaggctgccattggccagggtttcaaccgcgtggccaatcgtatgaccgtaatttaataattggcgttgattactttctttttcatcggccatgacaatctgtgccttgtagtgcacactttgctgaattagtgtttcagcctgcgctagaatcatatgcgcactttgaatccctgttacctgttgccaaaatgtcccaccgttgagtgcagccactttaacgatttccgcataaccggccagtaattggcgttgatccagcgacgttaaaaagtcgggatcaatcaatactaaatccggctggtaaaaagaaccaactaagttcttgccagctggtaaatcaagtgcagtctttccaccgacactactgtcaacttgtgccaaaagcgaggttggcatctgaataaatgcaatcccccgcatataggtggacgcgataaaccccgccaaatcaccgacaaccccaccacctaaagcaatcaccccgtcatgacgggtaaaattcgccgctgccagttgggaataaagtgccattgcttggtcaagtgatttcgacgtttcaccagccggaataataatcggtgtgacttgatagccaacttggattaattgagattcgaccgtttctaaatacaacggggcaacattcgtgtctgtgattaatgcgatttgacgaggtgtccaaacttgcgcgatttgttcagcacagatgtgatacaaaccagattggatccgaatctgataatttttttgtgtgaggtggacatcaattatcaccattagtgccgccactgtttgacgactgcatcaacggcccacacttgatgacacatttcaagataagtagctggctttaaggcttgtgcgccatcagaaaaggctttttctggatgatcatgaatctcaacttgtaacccacttgccccagttgcgactccagcccgagccattggcgtcacaagatcccattcaccagtcgcatgactcggatcaattaagactggatagtgcgttaatttttgtaaaactgggacagcatttaaatcaaatgtgttgcgcgtatagtgattgtcaaacgtccgaatcccgcgctctaacagcataatttgttgattaccgttggcagcaatgtactcggcagcatttaataaatcatcaacagttgctgctaagccacgttttaaagcaacgggaacgttggtttttccaacagctttcaataatgaaaagttttgcatattgcgcgccccgatttgaaaaatatcggtatattgcgccactaaatcaacatgcgtttcatccatcacttcggtcacaacgtccatttgataagcatcagcagccttgcgcaatgctttcaaaccagcttcgcccatcccttgaaaggaatacggtgatgtccgcggtttatacgcgccaccccgcaaaatagtcgcaccgccttctttagcaactttggccatcgccataatgtggtcagcagattcgaccgaacaaggacccgccatcaccgtgaagtctgcaccgccaatcgtactgtgtgctaattcgatgaccgtgttttcgggttggaatagccgactgccaagcacgtaactcggttcatccgtggtggttgccgcaatgacttcttcctctgcttgggtaaaatcaattgcttttgcaccgatcaccgctacatggtgcttaatctgatagacattcggatttgtcgtgcgttgtcgtgcgcaaaaatcatcaatcagcgctgaatcagtatttggtttaaattgaataatcataaattattaaaactccttcgttaaagcatgatagatgggatcggtttgtaggacctggcccgtccagaattgaaaactcaacgcggcctgttcaactaacatgccaagcccgttttgggttggatgaccacttcgagccgctaactgtaaaaaagcagtctgacgtggcgcatatattaagtcggcaactaaacaagtcatcggtatttgaccaattaaaggtgctgccagcggtaatccaggggtattgaccatgccaagattcgtggcgttaatcacgcaatcagcattactgagtgcttgttggagtgcctgttcatcggcataattatgtagcacgatggacatcgaatggtgattagcaatttttgccagtcgttgttcaaccaccgcataagtcgtattttgacgtttgaagacctgaatcgtcgccacaccatagcgagcggcggcttcgataaccgcgagagcagcgcccccaccacccagaataacaatctgctgactagctagattgggatatcttttctgcaaagcgcgccaaaaaccatcgccatcagtattcgtgcctaccaatttacccgatcgtaaagcaaccgtattgatggcgccaacgagttgcgcagttggcattaactcgtccattaatggcacaagcgactgtttatagggcattgaaagattaacgcctgccacaccaagcgtccgaatcgcttttgcgacatcttgcggccgtgcttggctatcgaaaaccagataccgcgcgtcgatttgatgttgtttaaaacccagattatgaatcatgggtgacaagctatggtgcgctggatgcgcaaccaagccgtaaagagctgtataacctgatatcattacattttcctctaaaactatcatactttacttaatgagatttttaaatggttagtatcaaaaagtcatgcttaatactgttattttttgtcattatccggtaagattaacatagattgaaaacggttaatataatagaaagaggtccttaataatgtcgatcgaacgtcaaacgttatccgttaaagaacaagcatttatagttgatgcatattggttaacacccattccagatttcgagcatccagttaaacatcccgtcatgattatttgtccaggcggtggttttacgtatcattcaggtcgtgaaacaacaccggtcgcgttgcgatttttagcagaagggtttcacgtgattgttctcccctaccaattaataagttcgactgaaaccgtttatccgctcgctttacatcagcttgctaagacaattgagtgggtgactgatcaagctggagaatatgatattgatttggatcgaattgttttgactggtttttcagctggtggacatgtggtcgctacctataatggcattgcgaccgatccaatccaccgagctgattacgggttagacgattaccgtggtcatcatgcagcgattgtcttaaattatcctgtgattgattttgacgctggttttccaattgatgatgcaactaagcaacagattacagtggaccaaactttatggcacgcacaaaaaaatatcacagcagcagctaaaccagcttttatttggcaaacagccacagacgcccttgttccagcaacgaattcacttctatatacacttgcattacagcaacataaaatccctgttgaataccatctctttggagctggtgttcatggcctttcgcttgctaatcatgtgactcaaacaccaggcaaaccagaatatgctaatactgtagcagctcagtgggtcccacttgtattggactggtttaaactgatggcaattttataagaacctaaaaagcaatggatacagtaatattaactgcatccattgcttttttgcttatttacggtctgccttattagcaatacctaattcttgacgatatttagcgacggttcttctagcaactttaatgtcatacttaacttttaactggtccgcgattttttgatcagacaatggatgatgggcttcttcttccttaacaactgtttgaattgcaatgtgcgtctgtgtcaaggtgggaccttcctctaaagttgtactccgtttggtcaacaaattccgcagaagatagataccattaggcgtccgaattgatttttctttaatcgttcggctaattgttgattcactgagctgcaattgatttgcgatatcccgtagaatcaattgattaggatatgcttgttttccagtaatataatcccactgtgccttgattaggacttcagcaaccattaataatgtttgcccgcgcttatgcaaactcgtgtttaacatctgatacttggcatatttttgctgaatgtattgtttggtagcgacatcgacttctttttggaactgcgcgtaacttgcatgttcaaaaatcagcgttggtcgcccaaattcagtcaatagtagctgatatcgtgagccattcatcttaataatgacatctggcacttgaaaattagttggtgagtcatcaaacatatttcctggttcaagactcagtgcacctattttgtgtaaaatcgattgcatgtcatcttgactaatggctaactgagtttgaatttgtttaatatcaccagctaataattgttcaaaataatcagttatcaccaaaatactaagatcatcagccggataaatagcagaggcctgtagtaataacacttcttgtgcatcacgaccaccaaccccgattggatcaagttgttgtagtaacgtcacaacgtcttgataagtggtctgatcaatttgattttcttggataaaacgggcttcatccacctttaaatagccatttggttcaacctccaaaatcagccgttgcaaaagttgctgtaatttacctgctttaaaccgataaccgacttgttccaacaaataatcgtataaattacctgttccgtgagccgctagctgatcaaaattgaattcttttgtacaggcttcgacggacccgacctcaaacaaggggttctctaaactacgagcttttaaataatccagtaggtcgagactattagattgcaaaatttttaaggattgttgcaatgtggtagattgcaaatttaatccgaattttcggacaaatttgtcagcataacctgatacggtgtttgccagtcgagtattttaagcggtcgctggttaatttggagtaacgtcgtcgttaaatcttgagcactaatgtgctcaaaacgagtccctttaggataaaaataacgtaaattccgattaaagcgttcgttactaccacgttcagctggcgtataagcatggcagtaataggtcttaataccatattgtgattcaagtgatactagtccactaaactcagtgccacggtccacagtaaagctgtgcaccggaccattaaaagtggttaggaacttagttagtgcttcattaacagtcgctgtcgtccgatcttttaaccggtatgcccaaaggaaccgtgatttgcgatcgattaaagttaataaaactgccttactatgcccacgaggaccaacgactgtatctagttcaaaatcgccgatgcgcttacgttgattaatcatcatgggacgctgttcaattgatcgccccaaagattgattatatttggatcgttggtcaacgttacgccgttggcgtacgccatgttcaggtagatcattcaaggagaaaccaattctcccctgatttagccaattataaatagatttagtagctagtttaaattcgtgagcaatcattcctggtgaccagcttagacgtaaatggttgagaattttttgctttaactcatcgctcagcttagttttccgaccacatcgtgatcgcttgtattcggcatctgtttgtgctaattcagcctgataaggttgacatcgagataattcataagaaattgttgacggtgatcggttcagccgaacgcccatttggatattggacagccctagttcacaaaaggtttcgattttaattcgttcagaataggttatactagacaaaagatcagctcctaaaagatgggtttgtggtaaacaccattttaaaggaagctgatcttttttgtccgaacagcgttcggattaattttacaatctaccttattaccaagtccagttgctgcgcgtgctggcggatcttcgggtggctctggtggttcgggtggtagcggtggtgggtcttcaccgacatccagttatgttggcggccgtagtcgtgattattattacgatgatgcgggatgtcggcattactacaagtccctaatgcgtcgtttattcgatagtatagtcaccctgcctttcgtattcgtctcccttgggatcatgatttggcgtaaagtgcgtgactggttaaccggacgtagaaaacgggcactggctgataccatgccgttagatgctgaaaccgcggcgcgctttgaaaatgcattctatcaaattgaaacagcttggccctcaaatgacttaagcaacgtggcggacttaatgacgccccattttcagcaccaacaacaacgcatcttaaaccgttatcaacggcaccataaacataaccaacttgagagtatcgccattgtttcaactgagttattattacctgaaaaaccgaaccgccaagatattctagtgacagcgcaaatgcgcgattacttcactgatgagcggcagacagccacggttaatgaccaacgtcgtgaagcggcttatattgaacgtttcagcgaaatttgaacgtttaaattaattgatggtcaatatcgtgtcgctcatattaatcaatccctataaaagagctaccagttggtggttcttttttgttatttaattggttaagtttattgcgttaaacaactttttctcttaaaatagaccttatcgatttaaaaattgtttatccattttgattagaaagtgaggtcatttgatgaccctccatgttggcactgaccagacacaaacggccgtttccttaatgccgcgtaacctagacgattgtgtgcgtgaaatggtactcgttgagcaaaagcaagctgcgattgatattctagaatggcgcttagactattggcaaacaccagcgaccttattaacggctggtcaccaaattgccgcctgcaagcaccccgttattttaacgctcagaacaacccatgatggcggcctgtctgatccaaccgactatttagaccgctatacagctctattatcggctcaaatcggcgatgtggttgatattgagtggtctttacctgaggcagttagaaaagccgtcagcgcgcttgcacgtgcgaatggctatcaagtgttactaagccatcatgatttaaagacaacccctgataatctaacacttcaaaaacaactcgcagcaatgcatgcgacgcacccagatatgttaaaactagcaactaccgctcaaagtaatgaggatactactcggttaatggcgattacccagtcttttacacatgatcacacaaccccactgatcacgatggcgatgtctgaatttggcttagcctctcgcatttttggtggtcaattcggttcagctgtgagtttcggttaccttgaacaccccagtgcaccaggccaattacccattgaacaactcaaaggcttgttgacaatgcatcaaaattaaccgcacaaaaaaagccccgcacaaattcaatttgtgcggggctttttagattgttgattagttccgttcaacgtttaaatcattcatcttaagcattgtatcaacggccttttccattgtttcgattgaaacaaattcgtagcgaccgtgcatgttttcagcaccagcaaagatgttaggggttggaatacccatgaatgaaatcttagaaccatctgtcccaccacgaacaggttcgattaatggtttgatatcaacggcttccattgcatctttagcaagatcaacaacgtccatgtgatcttttaagacttctgccatgttgtagtattgatctttgattgttgcaacaacgcggccttcaccgtatttagcattcatttgatcagcaactttagcagcaaatgctttgcgttcttccaaaccatcacgttcgaaatcacgaatgatgtaagccatgtgtgcttcatcaactgtgccttcaaggcttaataagtgatagaaaccttgacgaccgtctgttttttcagggacttcatcgcttggtaaagcattttggaaatcaacagccacttgaagggcattgatcatgatgtttttagcttcactaggatgcacgtttttaccttgaatatcgactttcatggcagcagcgttgaatgtttcgtattcaagttgaccgattggaccgccatccattgtgtaagcaaagtcggttgcgaaatctttggcatcaaagtgatcagcgccagttccgatttcttcatcggggccaaaaccaatcttgatgtcgccatgtttgatttcaggatgttggactaagaagtccatggctgtcatgatttcagcaaccccagacttatcatctgaacctaataatgttgagccgtcagttgtgattaaagtttggcctttataatttttcatatttgggaattctttaggatctaatacgaatttacccgcatcatctaatttaataattgattcgccatcatagttttcgacgatttgtggattgacacctttggcattgaagtcggcagtatcaacgtgtgataaaaagcccattgttggcacttttttatcaatattacttggtaatagcgctgttacatagccattactttcgttgtatttcacatcacttaatccgatttccttcaagtcgtccatcaatttgtgtaaaaataccacttgtgtttgggttgatgggctcgttgttgcgttttcatctgaacgtgtttcagttgtgacatattctagaaaacgaggaatcaatttttcatatttagccatggtgtagcctcctagatattatttaatactaattctattctaacctacttcgcattaaaaataaatgtaaacggatcagttttttgctgtgatttaatgaatgtaaccgaccaaccacgctgtttggcccacttttcaaaaatttctgtcatcttatccttcacaatactttcgacatgatgaccaggatcaattactgacaaaccagctgccaacatatcgtgaccagtatgataatacacatcaccggtaatgtagacatccgcaccagcttgtaaagcggctgggaagaatttacccccatcgccaccgacaacggcgactgtctgaactattttgtccggttcatttgaaattaagcgcagacctgttaaatcaaatgtttcgcagacaaattgcgcataatcccggaccgtcattgattgagcgacttgaccaatgcgcccaataccaatcggttgttgttgattagctaatggaatcacatcataaacgggttcttcataaggatgcgccgcaagcatcgcctgaacaactttggtttgcatggccactggcagaacaacttcgattttaacttcggtaaccgcttctagatcacctgattggccgatataaggatttgctgcgtccgttggttgaaaacgccctattccggtcgtactaaaactgcaggcttgataatcgccaatatgtcccgcatcagcttgattcaatgccatccgcatctgttcagcatgtgactcagggacaaagaccaccaattttactaatgattggtagtccgtgatgttaaacggttgcacatcgtttagttgtaaagcttcagctagccaatcattcatgccgccgttagtcttatccaaattcgtatgggcggcatataccgtgatgtcatgcgttaacagatccgcatacatcttgttttgcggatcacttagatcgagattccgcgctgggcgaaacattactggatggtgggcaaaaataaaatcaacattctgttcaatcgcttcttgaacggtttctgggcggacatcaagggttactaacacccgttcaatgcttttatcgcgtcgcccgatttgaaaaccggtggggtcattgccttcttttaatgccaatggtgcgtagtcttcaatcgcagcaattaagtcactcgcgactaattttcccatgtcttcatctcctcgattaatgcaatttcatgttcaactgctttgactttatcagtaggtacgacttgtgcgttttgtaattgttgcaataaatgacgccgttttttcaacattgtcccccacttcaattggaaatcagcaggttgtgtttggcggagaacagggccaaacactcgatcactttcgcttaatggtgcaactgatggttggggttcgccaacaatcacttcgtagatatgcccgtcttcagcgacaatcgcttcatcaacgattacatagtcatgtgcattcaaccattcacggacagtactttccatgatattgggttgtaacacgagtcgttcatggccgttcagatgatccaatccacgggttaaaatttccgtgatcaataaaccacccatgccggcaatcacgatgcaactcacatggtcttcttcaggattcaatacctcgacgccatcgcctaagcggacttgaatctgttgttgtaagtgccattgattaacgtgagtctgtgttgattcaaacggaccggcaactacttcaccggcaatggcgcccttcaaccggttttgttccgtaagccaaattggtaaatatgcatgatctgaaccgatatcagcaacaatgctatcttgtgggacaaactgcgcaaccgcagctaaacgctttgataaatgaattggtgacaaaaataaaactccattctagaaactttgattgttatagttagtataccaaattttagacggcatacgcagtcaaagtgaacacttgattctggatagcagaagttgctttaggcaaaatttagttttatactgaaattaaatcgaaaacgctttctatacattaaggagtggtctcatgagttggttgcaactattctgtgttttcatgattggtttaggcatttttcaaatttataagtcgtatcagtattatcaagacttaaaattacacgcagatcaaaatacttctgtctttgcgccagcagcgctctgttcgagtgctttcatggggcttgtctttattgggattagtcttgctagtttattgaattggttataaacgtcaattagccccttctttttgagctttattagttttcggaaatcctagttaacataagataaattatttacagtgaagggggtggtaacatgaactggttaccaattattgggattttaatgctaatcatcggtgttttccaactttcaatgaccattaaaacattcaagactttgaaggttgaagcaaaccacagtacttcagtcttcatgcccatggcgttatggtcaggtgcattgatggggattgtatttttagcagtggggattggtgctctgcttgtttagatacacgcaaaaaaggccgcaagctaggttagcttgcggcctttttattgattgcctaaacgtgctttttagttcaacaacttccgcttaatctaacattgccattaattctaaaatctgaattaatgacaatattgtattaatgctcagttgctcccgtaactaaacgcactttatcgaaaacgtgctctagcaggcatatttctgcggctagctacgtcagtcaaacaaccaacatcgttggttattcgcctgactatgctaaccctcaaaatatagccgcctgcttacgcactcttttattctaaaaagtcttttaattgttttgaacgtgatgggtggcggagtttccgtaatgctttggcttcgatttgacgaatccgttctcgcgtaacgccgaacaccttacccacttcttctaatgtccgtgtccgaccatcatcaaggccgaaacgtaaacgtaagacgttttcttcacggtctgttaaggtatctaggacactttctaattgttctttcaacaattcataagaagcatgttcttcaggactggttgcatcttgatcttcgataaaatcgcctaagtgtgaatcgtcctcttcaccaattggggtttcaagggaaacaggttcttgagcgatcttcaagatttcgcgcaccttatccgtattcatatccatttcagcaccaatttcttcaggcgttggttcgcggcccaaatcttgaagtaattgtcgttgaatccggattaacttgttaatcgtttcaaccatgtggacaggaatccgaatggtccgggcttgatcggcaatcgcacgcgtaatcgcttgacgaatccaccatgtggcatatgttgagaatttgaaccctttacggtgatcgaatttttcaacggccttcattaagcccatgttcccttcttgaattaaatccaagaattgcatgccacggccaacataccgtttagcgattgaaaccaccaaacgcaagttagcttcggcaaggcgttgcttggcttcttgatcaccttgttcgattctcaaggctaagtcaacttcttgttgggcgtttaaaagagatacccgcccaatttcttttaagtacatccgcacaggatcgttaatcttaatcccggttggtgcagtcatatcttttaattctttagcagaaaccttttcctttttaagggtagcggcacttggattcccatcttcatcgacaatcccaatcccttggtcttccactttttgcattaattcattgatttcatcagcttgtagcgcaaatggtttcacgatttttgcaacgagttcatcattggtgatttctttctttggtttgtattccttaattaaagccttaaccgcaatatcaaatttcttcgtgtcagcttttttattatcagccattcagaaacctcctaatatcaatttcctaatttcttttgcgaaacaagtctaatgacctccagggttaagcgcgtttcttcgctcgcattccccaatttggtcgcctcttttaaggcaattttcgcttctcttaattgttcctcaacgttattttgcgcaatgacgaacagacagtcgtttaacgcctcttgacttgcctcttctggtaagtcaagcgcatcaatctgaacgactaaggcttgtaagtcatctgggatataacccatgaagtcggccaaggtcgacttaccttcagctaaaaaggcgcgccataactcgtaaatcagttggtacggggtatgcacaaaactaaaatcggcattgttctccaattgcaggcgcatatcgtcattagccatcaacatatgcaacacttcttgctccgcgtgttcaacccgggttagccgttgtggctgacgcgtcgctgttgcccgcggatcaccaatgattggcggtggtccacccacaaatgcgtcatccggttcaggtggcatgtcataatcatactgactagatgccggtgcaagtggttgctgcgttgcccgtttaacgcgcaatgtttgtaactgccgcttcaacgtatcaagggtaatgccgctatcggcttcaatttgcttgaggtaaatctcgatttcaagcggcgaatcaattggcgcaacgacggacaatgcctgttgcacgtaatcaagttgatccttctcgttatccagatttaacccttgcttcaaataccgcagttcaaatgcaatcggtgtttcagcaccattttgcaaggttgtcttaaattgttcagcaccatattggcgaacatattcatccggatcagcgccactgggcaaaaccaccacactcaattcaagcttggtattttgctgcaacatggtaattgcgcgtttcatcgcttcgattccgggacgatcaccatcataacagacaattaattcccgagcctgttgccctaaaattcccaactgctcagtcgttaaactcgtccccattgaagcgacaccgtttgaaacaccggctgaatacgctgcaatcacatccataaacccttcaaacaggtaaactttgcgttcttggtgaatagcagtctttgctaaatcatagttgaacaaaaccttccgcttgttaaaaatcacggtttcaggactgttcaaatatttgggttgatctggttgtttcaccaaaacccggccagaaaaagcaatcacttcaccttgcgcattccgaatcggaaacatcactcggccggaaaaacgatcatgcagcttgccggtctgagtttcaataaataagccggattgacgtagtgtctggtacggaacttctttattctggaagaatgaaagcattaaatcggtttgatccggtaaatagccaatactaaacgtctcaattaattgatccgtcaagccccgttcgtgtaagtaatctaacgctggttggcccgcttcagtactcattaaaatatgcgtaaagagttcattggcctgacgatagagttgcttaaactgcgtcacttcacttgattcttgaacattttgagtgggtcgataagtctccgctaaactgaagccgacaaagtcagcgatttttgtaacagcttctggaaaactaatctgttccagttccatcaagaacttgaagacattcccaccccgtccgcaagagaaacaatgaaaaatctgtttctcttcactaacggagaatgatggggtcttctcatcgtgaaacggacaaatcccaaataggttattgccgctcttcttgagctggacatactgaccaacaacatccactatgttagtttggctccgaacatcatcaatcacgtcattcggaatctttcccgccattggtctcacctcactattcaattcaaattgtactaagactgtaaaagccgcacctcacaatgaaatgcgacttttaaggattatcagcacaaaaatacactatatatcatagcaccatttaggtacagttgcaaataaatatagcaaactatctcattcgttgtcaaggtcctttttcaaaagtcccattaagatgacaacgtgattatattgcaggtcctttgccgcatagactaatgtgacgttgcccagctcaaggtgctcgtgcactaccttttcaaacgccggccaagctggattagctgcaatttcagcaaggtacttttctttaaaaacgggaaacttagctggctcatgaccaaaccacttgcgtaagtcagtcgttggggtaatttctttcgcccaggtctcaatagcggcgcgttcttttgaaatgccgcggggccaaatccgatcgactagaattcggtacccatctgagtctgtcgctgcttcataaacccgtttcatttgtaacatgctattatccccttttgaattgtttatttaacaatcaattcgtttaaatcacctaaggtaagggcgatttgagcgataatcatcaactgtgttaagcgatttcgacgaacagcttcatcttcagccatgaccattgtggcatcaaagtaagcttcgattaatggtcgtagtgtttgtaagatgccgtaattatcagctaatgggttcgtagcaattgtaccacgtaagtcttcgaccgctgtgtgaagtgctttttcagcttcattttcgaataatgcaggatcaaccgttaaatcagttgttgcaaagtcaactttttcagcgagtcgtaacacacgtgtcacggcttcaaccgttgccttgaaatctgcatcatcttgatggtctgaaagcactttggcagcttcgaacatcacgactggatcttgactttgattcttcaagacggcatctacgatatcacgccggactttaggccgcatgccgttaaagcgttggcgaacacgatccgttaagaaatcgctgatcgcgtcagcattggttgaccaatcaaggttgaaatcagcttgttgcttaacaatgtcactcatcgcagcttgataatcggccattgggaagtgccagttttggttttctaagatgcggataatcccataagcttgacgacgcaatgcataaggatcgtttgaaccacttggaatcatgcccactgcaaagaaatcagccatactatcgaacttatcagcgattgctaaaaccgcgccgacctttgttgcagggagtgcaccttcagcactaattggcatgtagtgttcgcgaatcgctgtggcaacggctggtgtttcaccttgtaataaggcatatttttcacccatgaccccttgcaattcggcaaattcaccgaccatgccagtcactaagtcaaatttataaatatcacttgcccgttgcaaatcaactaattctgcttctgataaaccaaatttttggcctaagaattgcgcgattaaaccaacacgggtcatcttttcagccagactaccaatcttgtcgtggaatgacacgttttgtaacttcgcaacgttttgttcaatcgttaccttttgatcttcatggtagaagaaatcggcatcttccaaacgcgctgtgaggactttttcgttcccagcaatgacattttccatgaagtcggtgttcccgttgcgaacaccgatgaaaacaggtaataaatcacccgcttggctgcgtgcgtagaagtaacgttggttatccttcattgaggtaatcaacacttcttctggaatttcaagatacttaggatcgaattgcccataaaaagcagttggccattcaactaagttcgtcacttcttctaacaagtttgcgtctaaatcgacttgccaatcgttttcttgggccattgtttcaatctgagtttgaattaagttttggcgtttagcttcatccgcaattacgaattgtgcttccagcgttgcttcgtaatcagttgcttttgccaatatcacggcttgacctaagaaacggtgcccttgtgttgtgcgaccagtcgtaacgtttaaaatactgaaatcgataatttcatcgtctaataaagcaacaatccagtgaattggacggatatattcgaagtcgtaatcggcccagtgcatccgcgttgggaaggtcatcgccataatcacggcttttagttctggcaaaattgtttcaacaggtttgccgatgattgatttttcaacatagacgtattcaacgccttttagtgctttaaaagtaatgtcgtcggtcgttaaaccttggccgcgaacaaaaccttgcgctgctttactccagttaccttcagcatcaagcgcaattttcttagcggggcctttcgcttcttcgtgaatgtcagcttgcttgtccgctaggtcttcgatcaagacggctaaccggcgtggtgttgcgtaagttttgatggtcccgaatgttaagtgttgttcttctaaaaagtcgcgtacgcgcttttctagttgttggatgctaggcatcacaacgtgggctggcatttcttccaagccaatttctaataagaatggtttagtcattgttaacgacctccgtgtttgattcttgagcatgttttaagagcgggaagccacgtttctcacgttcagcaacgaatgcttgcgcgattgagtgcgccatccggcgaatccgtgacaagtaaccggcccgttctgtaacggaaacggcaccatgggcatccaataggttgaatgtgtggctacatttcaagacatagtcatatgctggatgaacaaggcctaagtcaattaaacgttttgcttctgtttcgtattcatcgaagaatttcaaaagcatgtcttggttactgtcttcaaaagcatattttgaatgttcatattcaggttctttaaaaatatcgccatataacacgccattgccccattcaagttcgaacacgttgtcgacatcttgaatgtatgaagcaagccgttcaacgccatatgtgatttcacttgtcacaggatcgcattgcaaaccaccaacttgttggaagtaggtaaattgagtcacttccatcccgtctaaccaaacttcccaaccaacaccggcacaacccattgatgggttttcccagttatcttcgacgaagcgaatgtcatgttccaaaggatcgatgcctagagcccgtaaactatccaagtaaaattcttggatgtttaatggggctggtttcatgaccacttggaattggtgatgttggaataaacggttggggttttcgccataccgaccatctgctgggcgccgtgaaggttctacgtaagctgcgttccaaggttctggtccaattgcccgtaagaacgtgtatgggctcattgtgccggctcctttttctgtatcgtaagattgcattagcatacagcctttttcagaccaaaaacgctgtaaggttaaaatcatttcttgcacatttaactttttaaccatttcaattcctcttttccgtattttgcgcataaaaaaagcctatgcgactgttaagtcacatagggacgattactcgcggttccaccctacttcagctcaaagcgagctgctgcttcattggtatgactccgaaacgccaatccactcaagtcttgttctagttctcactcacctagaatcactgtctgaccgtcttaagggacccttttcttcaacgtctattaagttgattactattttagtcgtcttttggcgtgctgtcaatttctgacgacactttttttaattgtggtaattgactatcgaaactgtacatcttatcgatgaattgcttactcttgagcgataggccaaccgtgtcttgataaatccggtcgatcatcgtcttaagctccatctgcgttgtctgtttgacgttgaccgattgaatcttgaataaatcaatcactgaaaaaagacgcagataatagatagcccgttgactaccgtggaatcgattaacatccaagtgccagtggcgttgacaaagcagcccgccataactctcagaataatcaaacggcaaatcagaacgcccacaaaccgcacagacttgcagttgtggctgcaccccgaagacttgtaacatctgaatctcgataatgtgcgtaatcatcgccgcgtcaaagccttcatcgattaatgagagtgcctgttcaatcttcggataccaactgccgagcggttcgctatccggaaaaccaacatcgactaagcctaagatataggtcgcataggcatttaaaaacaagtcattgctaatcgattgaaactgactcgccgacttgacattatttaaaaaggataagccatcatcgcgaatgtcgccaccgtactcagcttgggtaaatggcaaaatagccgcactcaagcgaaacttcggtttattcgcaccgcgtaagtaaaacatctttttgccaaagcgatcggtcaaaatcttgaccagcatatctttttctttatagttcttccgatacatcactagaccattaaagtcttcgaatcgatgttccgccattgcttaagcctacaatctctttttattgtaaccaaattcacggaggtattggttattgtcacgccaattcttttgaatcttaacccagagcttcaagttgactttttcgccaagtaaagcttcaatttcgcgacgtgaccgaatcccgatttctttgataatggagcccttttgaccgatgataatccgtttttgaccatcacgttcaacaatgatattcgcttcaatctggagcttaccattgacgcggtctttcatccgttccacaaccacggcaacagaatggggcacttcttcatgcgttaattcaagaattttttcccgaatcaattcaccaacaacgaaatattctgggtgatccgttaattgatcttctgggtagtattgagggccttctgggagtatttgttccaattcttttaacatttcagggacattgttaccttctaatgcagagattgggtaaacccccttgaaatctaattcatgccgatattgttcaatcattggtaataaatcgtctggatgaatcgcgtcaattttgttaacaaccaaataaacgggttttttgacgttcttcaattggtccatgatgtattgatccccaggcccttttttatcaatcccactaatcatgaataaaatggcatcaacttcgttaaacgtcgatagcgctgcttgatccatgtattcatctaattcattatgtggtttatgaatccctggtgtatcaacgaacacgatttgcgcgttgtcatccgtgtagatcccttgaattttattgcgagtcgtttgtgcttttgatgacatgatggcaattttttcaccgatcattcgattcataaaagttgattttccaacatttggtcggccaacaatggccacaaagcctgagcgatatgtttctgacataatagtcccctttttagttaaatatggcgtgtccaaagacaatggcgccaatcaatagcgctaaaattgcgctgattaagacactggctgcactgatatctttaatctgcttagccaatggatggtactggtgatcgactaataagtccacgagatgttccataactgtattccaaaattcagccataaaaacgataaaaatcgcgaaaataatcactaaccaatctaaataatgtaactgacaataaataccgaaagcaatcgcaacgagtgcaaaccaggcatcacgccgtaaattagcctcagttttaaaggcggtccataatccaccgagtgcgtggcgtagtgactgccaaaaatgtttattcttgcccgtttgtggttttttaccgttgtaatccaaattcatcgaggatcttctcctgtaatggaatcatttgtgcttcatcttcactatgaatgtgatcataaccatttaagtgtaagaagccgtgaaccattgtgtaccctaattcacgttcaaatgaatgtccataagtttcagcttgttcagctgctttttctaatgaaacaaacaaatcaccgatattcttgggaatgtcgaatagttcttcaaagttggctggtaatccttcttcttcaggatcttcttcgattgcaaaactgatgacatcagtcgcacggtcagtatcgcggtattccttgttaatttggcgaatgcgttcgttcgtcacaaacgtgacagacatttctgtgtcttcaggtaaatctaattgttgcccggcatattctaaaatatccgtgaccagttttacgtttgcttctgcaactacttttgtttcatcgataatttggatatccattcaagtgttcctactttctcatcttttcaatcgccgcataggcgttaataatcttagcaacaactgggtgccgtaccacatcttctgaactgaactgtacgaaagcaatcttaggaatatcgtgcaaaatatgttcagcttgcaccaagccgctcattgttttcttaggtaagtcaatctggctaatatcgccgttgacaatcatcttcgagttaaacccaagtcgcgttaagaacatcttcatctgagcaggcgttgtattctgggcttcgtccaaaataacgaaagcttcttctagtgttcggccacgcatatacgcaagcggtgcaatctcaatgacaccacgctctaacaaacgttcagtatgttctttacccaaaacggcatacaatgcatcataaatcggtcgtaaataagggtccaccttttcctttagatcacctggtaaaaagcctaaactctcaccagcttcaaccgcaggacgcgttaaaatgatccgttcgactaatccttgtttcaacgccgcaacggccatgacaacggctaagaatgttttccccgttccggcggggccaatcccaaacgtgacatcgttttgacgaatcgcattcacgtattgacgttgaccgaatgtcttcacgcgaatatgctgccctttacgatccttgattaatggctccgtgtaaagttcttggaaaccagcaatcgtgcctttttgggccatcttcgtcgcactcaccacatcactactattgagcttaatgccatgttgtaacagcgccactaagttttctaaaacagaagcggcttggtcaactgctggttgttcgccgcgaatggtaatatgctcgtcaaacgcaatcagttcgacagataagctttcctcgatgatttttaaaaaagtatcgtgtgtgcccattaaagcggccgctaaatttggcgttgccaattgaaataaacgctcatctgtttcagccaacaaagataactccttccagagtgtgactgcaactgattctgagtattatctagcccagcaaataaacgactttagtcgattattaactacacgtcgtaaagtgaagaatcaagttgcaaccgcacgtttcaacttcatttgttttagaatgaaaactaccatcattctatcacaaacaacaaccgttttaaaagtagccagccgcgctaattcacgaatttatggtcaattatcaaaatctgaattaacgaccataaaaaaaagcgggactccccagaggaagtcccgcctaaaattaacttaattttgatttaacgacttgattgaccatagcgccatcagctcgtcctttgaccttaggcatgacatattgcatcaccttgccaaagtcagccttacttgtcgcaccagtagcctgcattgcttcgtcaacaatggtgaccactgctgcttcatctagctgctctggtaaataagcttgtacgatttcaatttctgcttttgtttgttcagcgagatctgcacgatcgcccttttcaaactcagctaatgaatccttacgttgcttaagttgtgatgatagtacacttaattcttcgtcagaagataagtcttgccccgcactaattttggcgttagttaaagcggtctttaaactccgaataacagctaatcgcaacttatctttggccttcatcgccgttttcaaatcagaacttagttgttcaagtaaactcattcaatcatttcctttatctaagaaattagaacttcttacgttttcttgcagcttctgatttcaacttacgttttacacttggtttctcgtaaaattcacgtttacgatattcttgtattgtaccagcttttgatacggaacgcttgaagcgacgaagagcatcatctagagattcgttactgcgaacgactgtcttgcccatatgatatccctcccctcgcgtgctaagtataaccgtttacgttcgttaaaaatttaacttcacgtgaaccgttctttgctattatagcgaatgttgaaaatacggtcaataacccacagggaattaattgaatattttttcaaatctagcgattttttcgataattatggtatgatagcgctataaaagtgaataaaggagcatgccttatgccagaatctaaaccattaaccgtttttgtgctttcggactcagtcggccaaaccgccctccaattagcacaagcagcgctcgcccaatttccggacgttaaacctgatctcgtccgcttccccttcgttcacacgcaagagaaactcatggacgtcttaagcaaagcggttcctgaagaaacaattgtggtccatacattagccactaacggtctttctgaaatcgccgaaacctattgccaagcgaaaaaaattgccagtttcgacatgatgtcaccaatgacacaaatgattactgctaaaaccaacagcacgccaactggtgaagctggggcactacatcatttgaacgatcgttattttgatcgcatttcagcgatggaatttgctgttatgtacgatgatggtaaagacccccacggtttcttagaagcagatatcgtgttgctcggtgtttctagaacgtctaagacgccgctgtcgctctttttagccaatcggaatatcaaggttgccaacttaccaatcgtgccacaagcgcacattccagacgaaatctggcgggttgatcctaagaaaattatcggcctgatgaatacaccagaagtcctcaataacattcgccgggaacggatgattgcttatgggttaaatcctgataccacttattcagacatggacgaaattaaagctgaattggctttcgcccaagacctgtatgataagattggttgccaagtgattaatgttgccaaccgttcgatcgaagaaactgccacaattattcttgaacgcatgggcctcgattttgcgggcagtgcgaacgatcacgtcaattaaaaaaagcgttcaaatctgaaatcgatttgaacgcttttttaatttgttaatgtttaatcgttaaaaaactcgcaaccgaactacgctgcgaatgaaacgcattaatcatcccttcactacggtaccccatggcaatcccaccaatcaacagttcattttccggaatacccattgctttgcggaccgcatctggatacttggccgtttcataggcaggaattgtatcaatttgttcgttagccgcggctaacagaatcgactgactaaaagcccccatgtcataaatcatccatggcgaaactttgcgctcaaccgtcaagtaagtcacggcgggcgcgttgaacagatggcgttgtaaatcgctaaaattcgctaacccgtcttcgccaagataggcactgatttcatcattccacacgcgactgttctcagccattaacggtccccagtctgtccggtgaatcacgtttaaatcagagtagcctttcatccggtttcccgttcgttctaaatgatcggctaacgtttcacccgtcgctacatagactttccaaggttgtgaattcgtccacgacggtgttcgttgggcggacaccattattttttcgattaattcatccgagatcggtttgtttgggtcaaatgcccgaattgccttgcggtgattaaccacatcgttaaactccatgtgctttcctcctccaactaacacttatttagcgcgttaattacattttaataacgctcataataccagtgtgttggcgtttcacctaatcatttgattggactagaaagtcccaccaccggaaccgccaccgaaaccgcctgatgagccgcctgaaaagccgccagaaccaccactaacacttgttggattagcagcactgaccgcactgccaacactactattgagagctgttgtaaaggattgaccgatgttcaaccccccagtatacccgtagtaataataataacccagaggcattgtttgaagttgttccggcgtcaatcgaatcttcaaagctttaacgaccttatcagcaatcccgaaggccgttgcataactcaaatatcgatcccacaatagtacatctgggacattcgccatatcgagtgtcgaaatatcctttagcatttgtttaaagccttgccattcgccccgtttttcgtaacccaattgcgtccatagttgcaaattaaatctacgccagacggttaaaatgaagacaagccccatcggaatgagcgtccaccaagcaactaagccaatcaaagcaccaaaaatcaaaattaaaaatagggcgccaaggccgattaaccaataattcaaactggtcattaactcagcgatgtgttctcgtaaccacccgctacgacttgcttcagtcgccactgctgtttgccacccatggtaatgttgattgaacagttttgcactatgccgttttggatatttctcaatctcaaatagactgacatgctgcccatcaccaaccacatcaaatagccagctaactaacttcttttctgaatgtgataactgattgcgattgacgagcgttaatgaaaattgcggcatttttttatggaatagttccttctttggttcctgaacatcaattgttagattctttcgagcaactaagtctagaatcgttgcggataagctctccgcccctgctgtctccgtaattggtaatgccaacaactgacgcacaaccgcaggcccattttcatctggcaaatcatagacgtgttctggtgcctgtccagtataagtcatcacaggaagcgtttttcgaattttacgtaaaattaacaagaacatgccgggcgctaagaccactgctcctatagataaaagccaataacggcgtttttgtgctttgcgttcttgattagcttgttgcgccaaacgtgcttcttgtttgataatggctgcccgacgtgattgatcaatctgattcggattcgccgcagtcaccgccgttggaaaaataatatggctttcgacaaattggtttgctggattattagcgagtttaattgttacccggcctttatcgggttcaacgacttgttgcccatctaaattgccgtgcgtccatgatttgaggtctgcttttttgaatgtggtaggtaattgtattaccacttgaacgttttgtaagtcactatcccacgcatcgccaatcactttccaattcaattccgccgtatcacgataattaataatcagattttgtaactgatatttcaaagtaaccgctaattgattgccatcttgtgcagtttggtatagtttgaaccgataattttgttgtgtatcagttaagctataggtgccttcagtacctgattcactttgactaaacggatgaccattaactgcgacttgcgggttaaccaacttctttggttgaccaacgtttgtttggagattctggttgatatagaccccatggatatcatcttggatatcaaacaccgttttttgttcgacctgagcactcccatcaggttgtacatcaacgtttacctgataacgactgatgtcataggtatcggcagcctggactggctggctaaaaataaaggtccaaaacgccgctattaagataaaaataccaaacttagttcgttttaaattcatagtttgccttcgttctgctcaaccttcgttaataaatcagggtcgaattgccccgctttgagcatcgcaatttcatacgcatatggtgcaaagttatgcttcttatcttcgccaacatatggggtttctagaattttaggcacattaacgagttgttcatgctgtaagacatggtttagcgcatcaaatccgatttcaccaaaaccaatattggcatgacgatctttgtgtgcgccttgtgggttcttagaatcgtttaaatgaacaacttttaagcggtccaaaccgataatgtgatcgaattcattcaaaacgccatcaaaatcttcacgcacattatatccggcatcatttgtatgacaagtatcaaacgtcactgataacttttcattgtaagtcacgccatcgatcatctgtgcaagttcttcaaatgaccgcccgacttcggttcctttacctgccatggtttctaaggcaatttgggcggtttgatcaggtcgtaaaatttcgtttaatcctttgataatttgttgaataccagcatctgcacccgccccaacgtgtgcacctggatgcaagacgatttgagtggcccctaatgcttcagcgcgtaacacttcttcttgtaaaaaagagaccgcaaacttgaagttctcaggcttcactgtattccctaaattaacgatgtatggtgcatgaacaacaattggacctaagttgtgagcttcaatatagggttttgctgcttcaatatttaattcttcgattggtttgcggcgcgtattttgtggcgcgccggtatatatcatgaaggcatttgcaccaaaatcaactgcactctccgctgaccctagtaacatctgcttgcccttcatactaacgtgactccctaataacattccactacctccatgcattttgattacctagattgtcacagaaagcgcaacaaaaagcaagacgaaacctaacccataaaaaaagcccgccattcaattgaatggcgggttatcttatttaatcttaggttcatagaaatgcccgagaattttgacagcttccgtcatgctgacgaatgcgtggtcatccgcttgtttcatgaccatttctaaatcatgcatttcaaagcgagaaataacggtaaataacatcgtcttttcttcacggttatatgccccttctacgtcgtggacaatcgtaatcccacgccgcatttcgtcttgaatcatttgaatcacaacttggggcttatcggtaataatcatcacttgcagtttttgttggcgcgtataaaccatatcgatgactttgccgttgacaaaaatactcaagatactatagagcgcatgttcccaaccaaagagaaacccagcggcaaaaacgagcgccacattaaacatgatattgattgaaccgactgaacggccggtttttttgcgcagtacaatcccaatgatatctaagccaccagtggaaatatcgtttttcaaggccatcccggtcccaaaaccgttaattaccgccccaaaaatcgcacagataatcggattagccgttagctgtgtaaagggcataatctgtaccataacacttgaaaaaacaactgcaataaacgtataaatggtgaaatggtggccaattttgaaccacgcaagaataaataatggcacatttaacacgaataacatcaatgacgttgataatggaaatggtagaaacggcataaatttcgacgtcactgtatgaatgaattgcgcgaacccggtaaccccagaggcgtaaatgccaccttcttcccagaaaaagttcaatgcaatcgacacacaaattccgtataaaatggctgccgaaatcttcgccatattttgatgtttccgagctaaatcgtccacttgaatatcacacctattcacttttgatgtctttcattctagcataccatttgtgaatactaaaggatttcttggaattaatgcacccaattttcacgaatgaaagcacggcgtgtcccctcgaccaattctgctctaaatggttcttttttatagaaatcttggtgatattcttcggctggatagaacggtttggcagcctcaatttgcgtgacaatcggttcgttgaagcgaccactatcgattaatgcttgtttggaagcttccgcgattgcacgttgctcaggcgagttaacgaaaatcaccggccggtaactatcgccacgatcttggaactgccccatggcatcggttggatctgtttggcgccaataaatttcaactaattccgcataagaaataatcgcgggatcaaatgtaatttcaactgcttcagtgtgccccgtcgtatgcgagcaaacttcctcataagttggattaggaacatgcccaccggtataaccagaaacaaccttgataatccccggttgctgatcaaacggatgaaccatgcaccaaaaacacccaccggcaaaaattgctgtatcagttgccattattgtgccccctcttcaaataagcttagatattgaccgtaaccttcattttcgagttgctcgactggaataaattttaaagctgctgagttgatgcaatagcgtaatccaccagcttcttgcggtccatcattaaaaacgtgccctaaatgcgaattagcttcttcactacggacttcaacgcgttccatcccataagattggtcccggcgttccgtcaaaggcgcaattggctttgtaaatgagggccaaccacagcctgcatcatatttatctaacgaactaaataatggttcatgactgacaacatccacgtagatgccttgttcatcaaaatcatcatactcgccggtaaatggggcctccgtcgcattttgttgggttaccgcatattgttccgtcgttaaccgttgttctaaatcatctgtcatatccatcactccttcgtgtttattattataagcagatacaaacagatagcgacaaatatgctcagagtgttctgacagtctgggatttcctgaggattaaagtgaattgactgccatcaaataaaaaagatgcctcaaatttacttttgaggcatcttatatgcgttaattttgatttaactgttgttgcactgctttaaagtcagcatagacttcagcaagtggtaccgtaatttcaacaccactaatcatgtctttaacatgtgctgtttgatcagctaattctgattcaccgattgtaatcaccatttgggcgtttaacttattagctgttttaaattgcgcttttggtttacgatcaagatagtctcgatcagcggttaaacctgtatcacgaatcttttcaacgatttggagagttgtcgcacttgtttcagcgccaattccaacgacatacacatcgagtttagattctggaaccaacgcttcgttttgcgcattcatcaataataataatcgttcaacgcctaagccaaaaccaacccctggcatgtccgggccaccaagttgttcaactaacccattataacggccaccggctaagacggttgtgtagccgcgaccaagcaccttattatttgtcataatttcaaaaattgtgtgattgtaataatcgagtccgcgcaccatttcagtatccacttcatatggaatgtgcaatgtttcaagtaagtgcttaaccgtttcaaagtgcgccgttgcttctggtgttaagtaatccaaaataacaggtgcatccttcacaatttcttggtccttagcatctttactatctaagacgcgcaatgggttcttgtgtagacgaactttagaatcgtcacttaattcatcaaaatgtggttcaagatagctgacaagggcttcatgataagccgcgcgactttccgcatcccctaaggtattgatggccagttttaaatccgtaatatggcattcacgtaataaacgcatcgccatgctaatgacttcaatatcgaccgctggattctcagaaccaaatgcttcgaccccaatttgatggaactggcgttgccggcctgattgtggccgttcataacggaacattggtcccatgtaatacaccttataaggtttttgatgttctggcccataaagtttattttctacgaacgcccgtacaactccagctgtgccctctggacgcagcgcgatatgccgatcccctttatccatgaaatcatacatttctttgctgacaatatcagatgtatcgcctgaactccgtgaaaagacatcatagctttcaaataatggtgttctaatttcgttgaattgatagcgggcaaaaacgtcgcgtgccgttttctccactaattgccactggtttgaatctccaggtaaaatatccgcagttccttttggcttttgatagcccatgatcattcctccaaatggataccaaataaaaaaacacccctgtcgttgaacaagggtgcttaaatgcacggtaccaccttaattttagcttaattatataacgttgttgccaacggtgtgcgaccacacagacctcaaaagcagtctcggcgtgccattgatttcttgcagctgtgaaatcatctctgtcgtagggggcttagcctttactttatcactggtcatcacttattcttattgttataagattaacgttatttcaaaaaaaagtcaatcaatcttgaattttttgtaactttttcgctgaaactctttagaaagttgagttttttgctataattaaccttataaattaataaaacataacaaaggtgttgaaaaaaatgcagaaacctttgagctggtttaaacactatccggccgttattatattagcattactcgtttttgtcggtctctttgtgacccacgcgctggctgcttaccaacaaattacgattaaagcgaacgtcgtaaacgttcgccaaggccctggattatcttatgatgtcatgagtcaagccaataaaggcgaaacaatgaatgttatctcacaaaagaataattggtaccaagtgcgcttaagtggtgataagattggctgggttgctagctggttagtcgataacaccgaagtcagtgccacttcaaaccgagtcgctaaggtcaccaacagttttgccaatgtccgccaaagcagtagtgccgatagtcaactactcggtaagttaaatcaaggtgacgaaattacagtcttataccaacaaaacggttggagccagattaaatacaactcagcagttggttgggtacaaagtgatttaatcgaagtttccgaccaagctccggcgactgttcaaaaaacgacaaccgctgaatctgagtctacggatactgatacaagtagctccgcgattaaatcagtgaccacccaactggataataccaagctacgcactggtcctgatgtttcgtatcaatatacccaaagctacccagccaataccaagctaacttatatcaataagagtggtacttggtatcaagttaaagatgccgatggtaataccggttacgtcgcaagttgggttgtcactccttctgagaagaatgaagttgttaagactagcgctacttccctttctgaagccaccattgttttagatgctggtcatggtggcaccgacgtcggtgcactttcaactaagtctaagtatgaaaaagactacacattagcgaccgtcgatgcgattgctaaaaaattaaaagcggctggtgctaacgtcgtgctaacgcgttcaaatgatagttttgtcgatctcgaaccgcgacctgctcttgccaataaattaaaggctgatgcctttatcagcgttcattttgattcaagcaatgaagccaatgaagcatccgggacaacaacctactactattcaagcagtaaggatatgagcctcgcgaaggccatcaacaatcagactaagacattaccgcttaacaatcgcggcattgaatacggcaattatcaagtccttcgcgataatcaacggcctgctgttctcttagaactcggctacatcaattctgataaagactttagttatattagcagtgctaattaccaagctaaagtcgctgatgccgtttataccggcttaaccgactatttcaaataactaaaaaagaaccgtcagattaaatctgacggttcttttttacataattggggcaaacaaacgcgccaagtcctgtgaccaacgttcttgattgctttgctcttgtatccgttgtttcgtaaatggtaagcattcttttaaatcagccgtaaaagattgttcaagttcagttgcgagttgtgcatcatataaaaaagcggtcgtttcaaaattcaatctaaaactgcgaatatctaaattagccgtcccaaccgctgctagttgcccatcaactaacattacgcgtgatttaaatccggttgattcagagaagtaaatctgaccgcccgccttcacgatttgtctagcgtaatacaaactcgcatgatgaatcattttatgttttgcacgtttggccatcatgatcttcacagtcaccccagaattaatggctaacactaacgccgccaatacagaatcatccggaataaaatatggggtctgaatccacagccgttttttagcggcagcaatcatcttcaaaaagcctaacttaatctcatcgagttctcgatcaggtccacttgataccagttgcatgctagtctgcccgtgttcatctgagttaggaaaatattgcggactgtaatacaccttttcctgacgcgtagccgcattccagtccatgaaaaagcgagcttgaaacgataacacaccatcgccggtaatccgaatccgcgtatctcgtgcaggaatattaacgtgatgattattctggttaaaatcgccaaggtaggcggtattgccatcaattactgccaattgccggtggttacgaaagttaaagcgtagattaacgaaccggaaccgagaactaaaaaacgggacaacttggccgccggctgcttccaatggcttaaagaactgccgggataaatgttgcgacccaaatgcatcatacatcacacgcacttttaccccccgcagtgccttgtaagccaatagattgaccagttgacgcccgtgttcgttgtcataaaaagcatagtattcaagatggatatgatcttgcgcccgattgacatccgttaacaactgttgatacgccgccttcaaatccgttaaaattgttacattgttttcctgggtcacaaccgcggtatttgatactaagaagaggttgattaagctctgcgtttctggcggtaacgtgtgttgcttctgcgcttggcgtaacgctgctttttgggaggtcaccaaggcatcaatgccgagccgttcttgtgttttcaaatcgaccatatgatcttccggtaatttttttccgaaaaatagatacaaaacaaagccgataattggtaagaaaatcaataccaagagccaggcccaggttgctgcaatatcacgttgttggcgaaatacggtgataacagccccgattgtatttgcaatccaaatcagtgctatcccccagataatgattgctgtcattcttcattcatcctattctttaaaccactttgcttttaatttggctagcgtaccatttgcttgtaagacccgataacgtcggttgataaattgacgtaattgttgatcttgcggacgcatcccaacagcaaactgttctgctgcaaaaggactgtcgatggcttgaaaatcgctgccgttgtggcgtgacttaatttcaaattgcgcgtagacttcatcaattaagagccccttaatccgatcggcctgtaagtcgataaacgcattgttataagtatcatataggattggtgcatggttggcaattctttgctgtaatcgtttaggataacgctctagttgttccatcccagatgagcccgtttgaacgcctaatggttggttggttaaatcagccatttgattaacagggtgtttcttgagcgacacaatcatttgccgattagtcagatacgggtcactaaacgcaacccgttttgcccgttgcgccgttttagaataaccactccaaattaaatcaatcgtttgattattcaattccgtttctttcatatcccaatcaatcgactgaaagtcaacccgaatgccactccccttaaaaatcgcccgtgccaaatcaacatcaaaaccggttaattgaccattcttctcacggtaagtcattggcacaaaactatcatcaatcccgacgactattttttggcgtttttgaatcgttgcccattgatcagcctgctgattgcgttgtgcgcaccctgctaaaccaatcatgctcatcaataaagccgctattaatgctgtttttttaagcttcatcattttgttgaaccccgtttggttgtaattcaaagatttgatcagcaatctggttggcaaattgaatatcatgggtgacaacaatttgtgtcattccctgctgtttcaaatctaaaatgagttgtgcgacacttgccactaacgatggatcaagtgcgctggttggttcgtcataacagagaatctccggttgcatcgccaatgcgcgggcaattgcgactcgttgacgttgaccgcctgatagttggaacggataagccgtcgcctgagcacttaaccctagttgctgtaataattttgcgccatctgctttagcctttttagcgggttgttttttgaccatgatgggtgccagcgtcacattctcaaggacagaaagatgtgggaataaccgaaaatcttggaagacaacgccaatgcgcgccccttgttcccgattactaggttcgtaaggtttaccatcaataataaaccgtccgctatcgggttgatcaagcccactcattaaccgtaataaagttgatttgccagcaccacttggaccgacaatcgctaaaatactccctgattcaactgataaatttaagtcgttcaaaatttgccgacctttgaaggattgattgatattttctaattgaaacatgttgccgcctccttagcgataataacgataatagcgttccaaacgccgtaatgcccatgtacaaatggctgttaacaataaataaataatcccgactagcaaaagtggtaagagattgacatcacgcgcacttgcgacattgccagcccgcagtaaatccccaatgccgataacatacactaacgatgaatctttaatcaagttgatcacttcgttaccgacagacggtaagacaattttaaccgtttggggcacgataattttagcgattgtttgtgggtaagttaagcctaagacctcagctgcttcgatctgaccattatcaacggcttgaaagccgccccggaaaatttcggcaaaatacgcagcataattcaaaataaaagcgattaaagcagcatcgaaccggttaaaaacaattccgaccacgggtaaaccataaaatacaaaaattagttgtaataataacggtgtcccacgcatcagccacacatataaatctaaaagataatgcagtggtttaaacttagctaataaccctaaacttaataataaaccaagtggaatcgcgccaataatcgttaggccaaaaacagccaacgtcatctgcgccccacttaataatgctggtaaaatcgataaactatagtcaatcatgacagactcctctcatttgtccaaaataaaaagccctctttgcgtttaaaacacaaagagggctaaatttcgcggtgccacctcaaatttttgtttgcctcacaacaaacaactcagttagttttagaccaataaaaaaagtcccctggatttctccaagaggacgaatttatcgcggtgccacctcagtttaataaactgctcacgcagcttaaacttatgtagtttctaaaactacagcgataacgggctaacggatcatctttattcgatgatcaaactcacggttgtgccattaatctcaagggccgacttccaccacgcatcagctctctgaacctcaagaattaatttggaccgttcaacgtttaatgtattgttattcattctattcaatatcgcatcaaaagtcaatggttaatgtttattgcttaccgaaaagacgggcccagaaaccaaccttgtgttgtttcaaagtcatcaatggaactgtttcgcctagtaaacgacgggcaatattccgatagccttggcttgctgggtttttcggatccatcacaattggttcgccggcattggacgtcttgataaccgcatcatcatcaaaaataatgcctaacaatgaaattgaaagatgtttggtaatttcatcaacatccatcgtttcgccttcattcatcatatgacgccgaatccggttaattactaagcgtggcgcaatccgcatttcttcttcttctagcaagccgacaacgcggtcagcatcactaacagaagaaatttcgggagttgcaaccacaattgcaccgtctgcaccggcaatcgcatttttaaagccagattcaatcccagcaggacaatcaagaatcacaaaatcgaattcttcttttaattcattcacgatggcggtgacttcatcaggcgttaacgcttctttatccgcattttgagcggctggcaataagtaaattttttcatcaaaacgtttatctttaatcagtgcttggtgcaacttagcacggccttgggcgacatccacgatatcataaataatgcggttgctcaatcctaagacaacatctaaattacgcagaccaatgtctaaatctaacaagcaaaccttcttatctaaaagcgcaagcgccgtcccaatattggcgcttgatgttgttttaccaacgccgcctttaccggatgtaataaccaaagctgttcccatttttattgctccttcattttacgatataattttggattaatctgtttcaaatccgttaactcaccgtagtcgataacatgtaaatcattgatgaaacttacactctgtgccgtaaatggcgtcttctggtgatcgagaatctcaactgcgtctgctatccgcaattgtaacgcgtgtgataaatcacctgcaacaactgcttctgcattatctggaaacccagcgtgcacaatcccggcaacttcaccaagtacgaagatactgcccgttgcttttaacattgcgccttggtgtaaattaccgacgaataagacatcgccaacataattgacctcttggccgcttcgtaaaacattgggttcaacgtgaatactattttcccgccgatcaatctcagcctgttcaatcgtcatgacttccgattgaatgcttgtcccattaaattctggaaactgctcaaagacggtcgccagtgcttgcttttgcgcatcattcaacaagcgtctaccagtggtcagctccagttcaatctgatcgctccccaactgcggttgctctaagcgaatcttattcaataattccgctagtgcaactaatgcttgatcgaaatccgcacccgcatcaatgtttaattcaaaaccttctttgcgtcctcgcaacgtgactgcatccatagaaaaatcaaaccccttaccgttctgattttaattttagcaataaatattttaaaggcaaatacaaaaagacaaaataaaccaaatttaatgcaattgtcggtgctaaaacattactaataaattcgactggtgttactgttgcataaccaatcaagcgattcatgatgtaaatcgtactctcgagtaatgttaaacacaagacatcgattagcccaatgaaaaaggctgagtcaggtaaatattgttttaaataacgcactgtatagataatgagcggcactgcaaaagtgtacatcccgatcatccccgtataatacaaatcgtataaaagaccaatccctgctgcataccacgtaagttggcgttcctctggtaaaacaaaggccgttaccactaacacgagcataaatagccggctaatcaacgtatgatctggtgtatataaccattgttcacataaatgactgatggcgccatccaaataaaacgcaacgagtaagtagattggtaataaatagcgccgttgtaatcgcgtcacacccatgctactcaccttcaatcgttcgtttgatgacagtcacaacggttaaattgtttaaatcagcagctggggtcacataaacagttaatgctaacccaaaatcgtctttcttaactgctgctaccttaccaaggtacaagcctttaggggttaatccacctaaaccagacgtgatcactttgtcacctttttcgattgccgcatcggtcttaatctgcccgagcttcaattgtttccggtcagcattgtaaccggacatgatcccattaacttgcttaccatctttggtattcaccacagcagcaaatccgttactactttgatccgtacttgaaacgagttcaaccttcgaattagtcttgttgacttcaacaatccgtccaataatcccagactcagacatgacgggcatatcttttttaagtccagctaaggcccctttattgataaccaatgcattttgccaattatcaggattccgggataaaacagacgcattaacggttgtataatccgtcaaggtgccttttaagccgagttcctttttcaaacttgcattttcttctttgagggtttgggtttgaaccttggtttgagctaaatcatcaagttgtgctttaagttctttgttttcctggtacgtattaatcaagtctgttaaggcatctacccctcgaccaatcccattggccggcacgctaatgacttggttagtgatgcccgttacgtcgttgccaaattggcgtacgaaactcggactctttttgttattgcgtaaaccaactgacattgcgatgaagcccatgcagacgattagcatgattaataacacaattaacttcttatttgaaaaaaacttttgcatggtttcttcgccaccatccatccttaatatcgtaaaggtgggacaaaaaccggtgatcagtagtccttcctatagcaatcgattcacaacccgaatctgtcactaatttaggcgctacgtcaacgctgaccgcttcttgtcccacttctactgaacgattaatttttcttcataacatcgatattctttaatgattcgccagttccgactgcaacacagtctaaaggatcttgagcgataaagactggcactttagtagcatctgaaatcacttctggtaagtgtttcaacaatgcgccgccaccagttaagacaatcccgtgatcaatcacgtcggctgcaatttctggtgatgtttcttcaagtgtttctttgatggcttcgataatggctgtgacaacttctttgatggcttcagcaatatcaacagcttgaatgtccactgtcttaggtagcccagttactaaatcgcgaccacgaatgctcatcgcttcaatttccttagcgcgttctggtgatgctgaagcgatttggaatttgatttgttcggctgttctttcaccaatcaacaagttattgttttgacggatgtaagaaatgatcgcgtcatctaacttgtcgccagccattcgaattgaacggcttgaaacaatcccacctaatgagattgtggcaacgtctgttgtcccgccaccgatatcaacgaccatgctaccagttggatccatcacaggaagaccggcaccaattgcagctgcaaatggttcttcaatgacgtatgcatcacgagcgcctgccaccttagttgcatcgattacagcacgtttttcaacttcagtcacaccacttggtacgcagaccattacaaatggcttgctagatgagcgacctaatgatttttcgataaaatatttaagcatggcagcagttgtatcgtaatctgcgatcacgccatctttcattgggcgaattgccacaatactaccaggtgtccggccgatcatgtcgcgggcttctgagccaacagcaatcacgtcaccagtttgtgtatttttagcgacaacagagggttctctcaagacaatgtctttaccgtccatgtatacgagtgtgtttgcggtacctaagtcaataccgatatttctagtccctaatccgaacactatttttctctccttcagttaccaaacgtttttatagtcattggcattatatcataattttacgtaataaaaaacgcaatgtaactactatgttaacggattttcagaaaatttgacaggtctcgcctaaaattaacagattcttaaagaaaaaagcgttctcttttactccactaagtaaccctcttctcgcaaactgagatactgctggcttccaataatcaagtggtctaggcatacaatgcccatcagttcaccacaggcgacaattcgtttagtgaaggcaatatcttgcgttgacggcgtcaactggccgcttggatgattatgcaccaaaataaattttgctgcagaataacggaccgctaatttaaagacttcccgcggatgcgcaactgaactatcgagtgtgccaatataaatctgtttcatctgaataatttgatttttaacgtctaaaaaaacagctagcagttgttcttgcgtttcgcccgctagtgtttcaatcatgcgacggccaaccatttggctcgatgcgaccacaccaaaccggagagttcgttgcgtttgcaatcggtgactcaattcacagatggcttggatttcaatcgctttgactggtccaattcctgccagtgtttccaactgcgttaaacttgcttgttctaaatcccgaaagtcaggataatgcgctagcaatttgcgcgccacctcaccaacagataggtgactattaccagaacgcaaaatgacgattgccaattgctcgttcgataaacttgctgcgccgtactgcattaattgttctcttggttgtaattgtcctgtattccccgccattgtttgcctcccacaaaaaaagacgcatgacgcgtcttcttggtttaactaacaatacgttaattaacgggcttatttttctaaatacggaatcacttgagccaaatccccaacggtcgcaagtgtttgctgattggttatcgcagttggtgcaattaaatcagggaccataatcaccggaatggcagctttactagcggccatcacaccattaggtgagtcttctaatactagggcactaggcgctggtaaggctaatctatccaacgcttttaaaaagatttcggggttcggtttgccgtgagtcacttcgtctcccgcaacaatttgactaaaccgtgattgtaggccagtactttgcataaagtcatcgaccatgctgcggaaattgctcgatgcaatcacccgactaatcccctgattatcacagtaatctagtaaatcgactaaccctggcttaattgcaacaccatctgcttcaacaaccgttgctacgttatggtatgaacgatcaataaattctgttgcggccgttgccgaaccaagctttgctttaaaataattgcgtaaatacgtatcagtggtccctaagatggcatggtgatcttcaggtgtaaaatcaaagcccatttctttagcggcccgaatattggcttggtaataaatcttctccgaatcaaccaatagaccgtccatatcaaaaataattcctctagttgtcattgactattctcctttaaaatattggcgaatcgtactaattaaatatagcgaacccgttacgagtaatacatcatcagccgacacatccgctaataattcggttaatgcaaccggccagtccggttcaaatgtaatcgtctcatcaactgctgcatattgggccgctgttgccgcgcgtggattatcaggaaccgtagtcagcaccatccgcgtcgctatttttttgagctgtggtaacatctcatccagatttttatcaccaagcgctccgaataacaggtaaatgtcacgatttttaaattgatgccgcgttgtctgaaccaattgcgccaccccttccggattatgtgcaccatccaagataattaacggctcatcgttgattttttcgaagcgcccaggccagttaacccgttttaaagcacgcttgatgtctcgaacctctagtttttgttgcgtcaactgtaagtaacaccaaaatacttgtaatgcaaccgcggcgttttcaatttgataatcccccatcagcggaatctgtaattgtcgatacgttaccgcgtcattttggaaagttaactgttgcccccaagtaggtaacgttttgaccgcagcactcgaaaaatcacagccactaatggctaacgaactattcaaacgagttgccgtttcctcaaccaccgtcagtgcttcttttggtaattgaccaatcacgactggatgaccagccttaatgatcccggctttttgagtcgcaatttctgcaaatgtcttgcctaatagagcctgatgatcaagaccaatcgacgtaataactgatatcagcggcgtcaacacattagtcgagtcatacaaaccgccaattccgacttccacaacggcgacatcaacctgctgttgtttgaaatatagaaacatcattgctgtgatccattcaaactcggtcacttcaaattcggggtcagttgtttgaatctgggcaaccgttgtctgaatttgttgcgtaacagttactaaatcggcatcactgattggttcctgattgataacaattcgctcgttgaaccgcataataaacggcgatgtgtaacgaccgacttttaaacctaactcttcaatcaaacaactgaccattttgacaacggatcccttgccattagtgccagtcacatgaatgaattgttggttttcttgcggattaccgagacctgccaacaattgcgtcattcggttcaggttcgcttctttatgtaatctggggcgcgaatgaatatacgccaaagctgtttcgtaatctgtcactaacatcgccaatctcctttaacaaactgtctctattttagcatagattgcacgcgaatcgatgcttaaaaactggcgcacacaaaaagaccacctcagtttttaaggtggccttaacgtgcttttggttgcaacaacttccgcttaatctaaaaattccgttaatcctaaaacctgaattaacggaatttttgtattgatgctcagttgctacccgcaaccaatcacacttctttcactaacgtgctcctcgagcagccttttccggttaactgcaaaatgggcatcatggcaaaaaacgccacaatgcccattttactgttaatcctcaaagcctaaccagctcgagtcgcacttcttttttaacgtgttttcatcaacagcttcttgtgctttgctacacttatcaaatcggcgcttacagcgccaattcgctaagttaggcaaatgctcagaagctaaccgttgatgatgcacttatgcattttttaattctgctactcgtttttcgactgattggtattgttgttcgtagtctgcttgtttgtcgcgttcttcttggaccactttttctggtgcgcggtctgtgaagcccttgtttgacaacttgcctttagcacgtttgatttcaccgtctaaacgtttcaattcgccttctaaacgggcgatttcttcgtctaagtcgagcaattcagccaatggcacataaacttctgcaccactgataatggctgtcttcgccaatgctggtgctgttaaaccttcagcaatttcaagtgacttaggatgtacgaagcgttcgatgaagtcttggttttgtttgaagatcgtcattaatggcgcatcttgaatgttgaccaagacatcaattggcttgcttagtggtgcattggcttcggaacggatattccggacacttctaattagatcgattaacgcattcatttgcgttgttgcttctggatcgtctaattcagcgtgcacttctggataagccgcattgacgattgaatcgccagtatgtggcatactttgccagatttcttccgtgacaaatggcatcactgggtgtaatagacgcaatgtttggtctaaaacataagccaagttataacgtttattggcaatggctgcttggtcgtctccgtaaaggacttccttcgccatttcaatataccagtcacagaaatcgttccagataaagttatacaatgtccggcctgcttcaccaaattcgaagctttcataaagccgtgtaacatctgccaccgtttggttcaattggcttaagatccatttgtccgttaaatcaaggttagcggcatctggcatcttcgttggcgctggtgtgtcttcaaggttcatgatgacgaaacgacttgcgttccaaatcttattgatgaagttccaggcagcatccatcttcgtgtaactgaaacgaacatcttggcctggtgttgagccactcgttaagaaccaacgcaatgcatcggcaccgtatttttcaatgacttccattgggtcaatcccattaccaagtgatttactcatcttacggccttgttcatcgcggattaaaccgtgaatgaggacgtgttcgaatgggcgttgttctgtaaattcgagactttggaaaatcatccgtgagacccagaagaagatgatatcgtagccagttaccaacgtattggttgggaagtagcgtttgaagtcaggcgcttcagtgtttggccaacccattgttgaaaatggccataaggcactactgaaccatgtgtctaggacatcagaatcttgagtccagttttcgatatcttttggtgcttcttcgccgacatacatttcaccagtttgtttatggtaccaagctgggatttggtgcccccaccataattgacgcgaaataacccaatcatgaacgttttccatccattgtgtgaaggtattttcgaatcgttctggcacaaagttcaccttttgatcggttgcttggttcttcaaagccatttcagcaagtggcttcatcttaacaaaccattgcgttgaaagccgggcttcaacttgtacaccggtccgttcagaatgaccaacactatgtgtcattgggtcgactttaatcaaataaccttgttccttcaagtcagcaacaatcgctttacgtgcttcaaaacgatccatgccgttatacttgccggcactttcattcatgctggcatcttcgttcatgacattgatccgtggtaagtcatgccgattaccgacttcaaaatcgttagggtcgtgtgctggtgtaatcttcaaagcaccagtaccgaaatccttatcgacatagtgatcagcgataatcggaatttcacgattcattaatggtaatgtgaccgtcttgccaacaaggtccgcataccgttcatcatctggatgtacagcgatagcagtatcaccaggtaatgtttcaggacgtgttgtggcaatttcgatgctcccagaaccatcggtcaatggatagttaacatgatagaaggccccttcatcatcttgatgcaacacttcgatatctgataaagccgtccgtgcttttggatcccaattgatgatgtattcgccacgatagattaagcccttgttgtataaggtaacaaagactttacgaacagcgtctgataagccatcgtctaatgtgaaccgttcacgtgaataatcaagtgataagcccatcttagcccattgtgcgtggatggttgcggcatattcatctttccagtcccagacttgttcgatgaatttttcacgacctaagtcataacgtgaaatcccttgttcagctaattttgcttccactttagcttgagttgcaatcccggcatgatccatccctggcaaccagagtacatcatacccttgcatccgtttttgccggattaacatatcttgtaaggtcgtatcccaggcatggcctaaatggagtttacccgtaacatttggcggtggaataacgattgaataaggtttggcatctggattggcatttggcttgaataaatcagcgtctaaccaatcttgataacgaccggcttcaacttgatttggatcatatttggttgacatttctttgtgatcagtcatcttgttcactcctttaaaatattgcgtttaatggcaaacaaaaaagcattcctcacaataggacgaatgctttttcgcggtaccacctaaattaggactagactagtccccaactcatgatttgttaacgaacgaaattgtccggttagccctacttaatttcaggttaacagctcacaagctaccgattaattggtcattggaagacgtctcagccatgcatcttctctctaaactagcccaatcttaatcgctcttgttcaacgcgttgttaatagtttagctgagtgaacgccaaaggtcaagcgtcaccggcgttcattctgaaaataaatcccgaatcttctccccaaaaaaatcctgagaacaacatactgttattctcaggatttttatagtttggcagattgcaagaaataacttgaacgaatttaatgacgtaaattaagcaagaagatctcgattggtgtatgccaattaagacatttaagtggccgtgaattcaaataccaattaatttgaaccaattggtgatcacttagttcttcaatggcttggcctttgggaataaagcgccgcaaaactcggttacggttctcattactgcctctttcatgcggtgaataggcatgggcaaaataaacctgtgtaccagttcgccgttcaattgtctgatagttagcgaactctttaccatgatctacggtaagcgtcttgagcttgtcttgaagttgactagctagttcaagtacggcttgagtcatggactgactgtcgcgaccatggagccgtttaacaattgtcaggcgactcttacgctccacaaaagtagccacagcttgacctttacgtttaccagaaagtacggtatcagcttcaaagtggccgaattcctggcgagtttcgactttatgaggccgctcctcaatggagcggccgtgattgaacgtaccacgcttttctttagcacgatgacgacgaattccatgatcaggcaaatcgggcaactgtatatcaagccatccttgatcaatccagttatagaccgtcttgtaggcaatccccaccacatgggcaacttgttcaggggaccacttctggacttgaatcttttcctcgatcaagtgtttaaggtttttagtgagcgaagacttccgcccccgttgactaacctttcgttcaaagtcagtttgcgctagcccagcctggtactcactatttagccggtgaagttcgttaaagatggtggtcttactaaagcctaagtagttagcgatgtatcgcaaggaacgtccttcattatgaagcgtttcaatgacaacacggttctggaatgataaaatagtggtgctcatcaaggtccttctttctaatggattgtgtggtaacaccattaaagaccttgatgggtttttctgtccacttaaatgttcaacttaaattttacaatctgccgtttacaatagttcagcaatgatttcttcgtcttgatttaagaattgatcgccagctttgatttctgtcactttaattccagcaagtgagcgttcaatcaaggcatccacatcgatgcgttgttcgtagaaccgggtcttatctaagttaggccgggtcttcggtgctggtggtgcaaaaatggtacagcaatcttcgaatggcatgattgataattcgtacgtatcaatatccttcgcaatttcaatgatttcattcttatccattgtcgcaactggccgcacgattggcgttgttgtgacatcattgatagccatcatactttcaagtgtttgtgaggccacttgaccgacagattccccattaaaaatggctaaaccttggcgcttagcacggatttgatccgttaaacgcaacatcatccgccgttgaatggtcattaagtaaccttctggcacagaatgcttcacttcttcttgaatttccgtgaatgggacttcgataaacttaatcccaccaacgtatggcaccaatttcgccgttaattctttggccttattcaaggcattgtcgcttgtgtatggtgggctaaagaaatgcaccatttcaatgtcgacaccccgtttgagcgttaagtaacctgctactggtgaatcaatcccaccagataacatcaacattcctttaccggcagaaccgactggtaagccaccagccccttgaatcacttggttggttaagtaaatcgcatcttggcgaatttcaacccgcaaagtaatgtcaggttttttcatttgcacttctaattcaggtaattcatctgataagtaaccacctaattcgcggttcatatcattcgtatccaagaagaaattgtgatcagaacgacgtgtgttaactttgaaagacatcccaggtttgccgatttctttcatcatggcaagcgccatttctttaacagaatctaaatcacgatcaacttggatacttggtgagaagttttggatgccgaagacgtgacggagacgttcgataacgccttctgcatcgtcgccgtttaaaacgatatgcatccggtcacgtttagggtgaatccggagttgtttatactcgtgaagcgcctttgtgacgttcccgtttaaccgaccgataaaatcgttccggtttttaccctttgtcgaaagttcgccgtagcgaaccataatttcagtgtattgcatgcctatctccttttagatggtagtttacgaattaatttttttgaagcgttcgttaatttgatcgaacgctttgatgaatgcatccgcttcttctagcgtattgtattcatcgagggatacccgaatggcgcttgtcgcaattttttcattgacgtgcattgcctttaaggtactagattcagtccctttcttcgaagagcaagcacttgtcgttgaaatatagatttcgtgttcttcaaacgcatgaaccgttgtttcaccgcgaacacctttaattgcgaagcacaaaatatgcggcgcaaaatcaggcgtcagttgtgaaaacataaccgttttatccgattgactgatatggttaaagagtcgttctcgaatagctgcttggcggtgtactttttcagtctcatcggtcaataacaaacgtaaggctttggccattgccgcgatggctggcacattttcggttccagaacgtaaatcatgctcttggcccccaccggttaaaagcggcgctaaatgacgcccgcgtttcttatacaaaatcccagtcccccgtgggccgtggaatttatgccctgataaggtcacaaaatcaacgcgttcgttgaaaatcgcctcttgaatgcctttgccaatcccttgaacggcatcaacgtggaaatgaatattaggataatccttcaaaatatcagcaatggcttcaagtggctgacacgttccgatttcgttattaatggccatgatcgaaactaaaatggtatcaggccgcaatgctgcttttaagtcagccggatcaattcgaccaaactgatcaacgggtagataagtcacatcaaagcctaatttttccagttgctgcatggatttaatgatggctggatgttcaaccgatgtcgtaattaaatgtttcccaaacgcccgtttttcaattgccgtgccttttaagacccagttatcgccttctgttccaccgctggtaaagaagatttcatcgtggtctacgcctaataaatcagcgatttgttggcgtgattgttctaaaatatgaaaggctttttccccaatcacatgtaaactagaggggttgccgaagaactgttcactaaccgcttgataggtctgaagtgcgcctggcgcgattttagtggtggcactattgtcaaaataaatcatatcgatccttcttactaaaaattagtgttttaacgttgtacattatagcaaattggttattaaagacaaccaattaatctttaacaaaacaaatccgagacaaaatgcgtcttgtctcggactggtgagcatctaagtgactaattagttgcgtctgacttttggtcgtaataggccttttcaacttgtgtgtaagcacctggatcaaccttttcaagggccgttgccaataagtcgacagctttagcatagtcgtattcttcattaaaaatagtttggaccgtcacacaggcttcctggatggcgggaaaatctgcacgatatcggttggcatattgtaacaattgctccgtaatcaatgcactgtcaattaaggtatccgtcttggccttcaattcatctaaatcctcttgaacgagaattaattgcttcgcgatatcgtctaaattaatcttaatttgattcaaatcatgatcaagtttttgaatctcatcagaaacaacgaagaagaaatccaaatatttctgttgtaaaccaggtaaattaaccttttcaacagcgcgcttcaagttacgtagttcaagttcaaactggcgtaagttttcattagcgacgacttcgccttgatgcaaactagcaacctgatcatgaattgcttgttgtttttcttcgatgacagttagccgttcgtcaatcccggtcaaatcttcagcaatcgccgtgtaaaccgcttcgtggttggcaatcttcgcttggtgcccttcaactaacgcctgttcttcaccaatttgcttttgtaattgtttggcgcttgccaactcaccatgtgtgagtgcataactctgattgagatgatcgagttccaataatagctcatggttctgacgttcagcatgttgcacgaatgtcgcggtggttggcaattgcgtcgcgactgccttcttggcagtcatctcagcttctaattgatcatataattgatcaatgccacgtgcaatttcatcgttattggcttcaaccgactcaatggccaaatcacttaacaaggtagtgctcttatcaagttgatccattagttgttgttgtttgacttcaatctgccgatcatcaaattgataatgttcttttaacatttgatggtaggtatcattaatttcaaccagttgttcgggaaactcgttagctaattcgttatagcgctttggaatccgttccatctggtcttctaattgcgttgtttcagtaattaatttctgcaaaatggccttagcccctagatggtcgccggctgttgttagttcgttggcttcgtcaaaatccacctctaagcgacctagcgttgcttcaagcgcatctaatgcaggtccaaacgaaaaactcttagtcaacaaacgtttacgtagttgttgatattgttctcgtagacgctgaattttttgacgtgtatcggcttcattggcaagtagattttctaaagcatcttgaacatccagtaaatcttgatccgtttcagtcaagtacgcccgcaattgtttgagaatccgtgcaacctgaatgaattggtatttggcattggccgtttccgcatcaaaaagatagccttcaatcgtgctgaagttatggttggtaatctgctcatattgtttttcccaacgatcaaagttttgcaaactttcgcccgtcaaatgtaacgaccgtaacttcgttaagcgttccggaatcggcaacgccattaagtcgcctttatgtgcttctagttgtttaatttgtttgataaaataacgttgataaaaaacaacacttaggtagccaatcagtgcgacgactacgattccaatgagaatgtaaaacattcaaagacacacccttttacaatttaaatcagatttgttagtccgttcatccacttcaattcattaaactatgtttgattatagcatgaataagataacggttcagcaataattagcgataaactttagaaaagctgcaattttaatctgaatttgcttgacgttgccgcacaccgtacgctatactagccattgtgtaaaataatgcagcagtaaacggtaaagccgtcaacagttcatttgcccagagttttggttcaattgtgtaaccttgcggctgcaaaggtgaagattgttaataagtgaactgaacgattactaagtttacatcggattattttactccaaaacatttattggaggatttttttatgtcacgttatacaggtccaaagtggaaactttcacgtcgtttaggaatttcactatcaggcacaggtaaagaacttgctcgtcgcccttacgctccaggccaacacggtaacgaccgtcgcggtaagatttcagaatatggtatgcaattgagcgaaaaacaaaaacttcgtttaatgtatggtttaacagaacgccaattccggaacttatttgctcgcgctggtaaaatccgcgaaggcaagcatggtgttaacttgatgatcttgctagaacaacgtttagacaacattgtttatcgtttaggtttagcaagcactcgtgcacaagctcgtcaattagtaaaccatggtcacgtaactgtcgatggcaaacgtgttgatattccttcatacgaagtaaaacctggtcaagaaatttcaatccgtgaaaaatctaagaaccttgtaatcgttaaggatgcaatcgaaggcacagttggtcgcccttcattcgttagctttgatgctgacacaatgaaaggttcacttgttcgtttaccagaacgttcagaattagaaccagaaatcgacgaagccttaatcgttgaattctacaacagataagcagttatctgttcaattaaaagagtcagacttaggtctggctctttttttgcgcatttaaagacgcgtgcctacttagcacacgcgtctgatttaatctatttagtctgtaccaactcatataaaggcaccatcttcatcaaggtcgtttgaatatcggccatgagagcttcgggttggtcgaataatgggttgtctttcagataaacttttccgaggagccactccccttttttggtcttagcaaacttatcttgaatcagtttcaagttctccgatgacattgggaatttttgcttggtcatgtgatcgtagcttaaatcatagtcggcaaagtcccttaagaggctttctgtttggcttgccaataacggtgcgtaatccgtcttatctggcatctcagccattaaagcaaaccaaacgaagatccgatcatcccaaaaaccgacttcaaagtgcggcatcatcttatacccgcgtgagctctcactaagtgccatccaagtattcattggtggatttttgaagcggcgtaaatgcttggcaatatgcaacgagaattcgcgttttgtttctactacgagttctgcttgcaattgcacaccaaatacttcaaactttggatcaagttgcgtataaatcttgtctaaccggccctttaaggtttggtcatcaaaaatatcaaaatcagcacgtgtaaacatctttttcctccaacatggtatacttaggtttaattctaatatagcacaattcagaaatgaggcgactattttgtcagataatgatcaattacaacaacacttggatagtgccatgcacggcgcaccacaaaccaatcccgatgaacgccgccgctacctcggctcattacgtgaacgcgtcttcttaggcattactaaccaggaactcgccactgcgcaagctaaattcgaagcgcatcttacggattataagccctattccgtcttattaaacggcaagaatcccgctgctaccgattatttagtggccctttcagcacacgggattccgttcacgctcgttaacaacgaaacagccaaaaccgaaccaacggccttcggtttgttagtggttgccaaagacgcgattaaccatgaggcaattacgctcgatacactataccctgatccaaaaaccacaacgcaagatgcacccaccaaaaaaggtggtttcttaaaacatcttttcgattaacactaaaaaggcccgcacagtttaacttgtgcgggcctttttgcattactttagtcggtttcaatcgctaattctgggaaaagtaattgtaagacagtcattgaaacgcgccgcgcttgacccatcattgggaacaagtgcatcaacatcgctggattgtagtttgcttctagcacaaccgccatctcagggtgttgcggatcatatggttggtataagtttggcacaatgatatcgattcccgtgatattgaggttcaaaatttcagcaacctgttcagcaatcgcaaagtaactttgatccatctcatcggtcacgtcaaccgaatcaccaccatttgagacgttggaattttgtagtaagaagacctgtgaaccacgcaatggcacatcttcagggcggtaaccttgttgtttcaacatgagcaattcccgttcaccgaggcgaatgttttgcaacggtgtcaggtgcgcttcgccacgtaatgggttgtcgtttttcttagcaacaagttgggcgattgttgaacgaccatcccccacgacattggctggaatccgttctaaaacagcctggaccttatgattcatcactaagaaacggtattccgaacccgcaatgaattcttcaactaaaatttgctgatcatacgtttgtgccagtttaaaagcagcaatgaagtccgcttcacttggacgcgttaaaaatgtggtaatgcccgcccccatgttactgtgttttggtttaatgacaatcgcgcgctgaccaaacgccgcttgataatctgctactgccgtctctaaagcggtatattcggcacccgctggcacccgcataccatgacttgccaataaaattttagtcactaccttattatccactaacggcccactaattagccgatctaaactcgttatattcccatttttgactaattcatgatgatgttgataggtcagctcaataaattgttcatcgcgatccaaaacagccacatgcagccctttttggaaagcgtcaaacatcagcatttgtgttgataattccatatccgtgtatccctgtaactgatagggagtctctgtcagctcacatttaaaacgttttgcctgtttgagggcaaatgcctttagcgagtcctcttcaatcgcttgtgttaagcgataactcaaggtttgtcgatggtcctgaacacgctcattcatcactgtccaagcttgtttaaaacgctcattcagatgataatccgtaatgaattgggccaaatcggccatcacagttttcaattgtgtttggagctgcgatggctgcagcggattctctaatgctactgtgtcatttaactgacgacccgtctgaatctgagtggctaaatcaccggataatttcggcaaggataataagtacataaagaataagtgtaagaagtctagctgttgttgatcaatccccgtcgcagtatacgggttaatatcaaacccccgaaattctaaataatccacaccagtctctaacatctgatccaatgagtgactccgtaaccgcacagttccgtaaaattcgcgttccgaaattaagtcgccattagcaatcgcttggcgcattgaatcaacatatgcggcaactgaatcaaaatgaattaataattgcttattgctgtagccgaataattcactcgagcgtaaactccgtacagggtgttctggtaatttcgtcatatcttctaaaaagcctggttccgctatcggactcgcaccaaataaatacgttaaaacatagtgataacgcacgtaattttgcgcaatctggatgtacaacgcatcgctaaaatcttttagactcacatagtgatcatgatagtattcatcaaataaacgcacaattaacgtcgatgacaggctaaaattataatggatgccagagaccatctgtagacgtcgaccgtagcgcttcgtcaaatagtcacgataggcttttaccgccggtgtgtattctgaaattggaatggttaattcatcgtctggtaacaacggtggcatgctgaggggccaaatatattccgaatcggccatacttgattgcaatacttgttcgagcgctaataattgttgttggacatctacggtctgttcgaaggtatccgtaaccagttccgtttgcatctctgcaaaatcagtcgcaatgtatggatgaaacgttcgcgatcctaactcactggggtgcggttgttgactcaatgcgcccaatccggtcactcgctgcccctctttttcgaccccaaaagcaccttggttcaataaaggtgttaagcgtaattgtttaatgttctcaaataattgattaggcattttgaaacctcttcttaattcagtcttatacaactcattatacacatccctaaaaccttttaaaacgataatcactacgaatttgcgcgacatgttatactaggaacaacctaaacattaaaggatgaacgctatgcaacaacctctcgcatttcgcatgcgtccgactaacatcgatgaagttgtcggtcagacgcacttagtggggccgcaaaaaatcattcgccgaatggttgatgccaaactcctctcatcaatgattctctacggaccgcctggtactggtaaaacgagtatcgctagtgccatcgccggtagtacccagtacgcttttcgcatgctgaatgctgccactgatagtaaaaaagatttacagattgtcgctgaagaagccaaaatgagtggcaccgtgattttactcctcgatgaaattcaccgcttggataaaaccaaacaggattttctcttaccacatctagaaagtggccgcattatcttaattggtgcaactaccgaaaatccatatatcagtatcaaccctgccattcggagtcgggcccaaatttttgaagtcaagcccctcactgaagccgacattcatgtcgccattcaacgggcactgacagataaagaaaaaggcttaggtgcactagccatcaatctcgatgaaacggctgaacaataccttgcccgcgtcacaaacggtgatttacggagtgctttaaacgccctcgaactcgctgctcgttcaacaccagcgaatccagacaccaacgtcatcgacatcgatattgacgttattgaagaatgcgtgcagaaaaaagccattactcatgataaagatggcgatgcccattacgatgtcatctccgcctttcaaaaatcagtccgtggcagtgacgttgatgctgcgctccattatatgggccgtttgattgaagccggtgatttaatgtcgattagtcggcgcttgatgacaatggcctacgaagatatcggcctcgccaaccctcaagcctgtgcccgtacagtcgaggcaattgctgcggctaaacaacttggttttcccgaagcccggattccactggccgtagcagtgattgatctctgcttatctccaaaatcaaattcggccatcaccgcaattgataacgcgttagctgatattcgcgctggcaaagccggtgaagtccccgatcatctccgtgatgcccattatgcaggggctgaaaaacttggccacggtgtcgactacaaatatcctcataattatcccaacgactgggtcgcgcaagattacctaccagataagctcttaggtagtcattattacgaagcaaaagcaactggtaaatacgagcaagtcctcaaacaacagctagaacgcttgcgccaagccagtccgcataagtgaacggttacaaaagtgttgtgttaacatcacgagcgtgctattataatagtaggatttctaaggtgtgcgcgtcttcccaccttatgttgaccgatcaagtaattcgttaatgggacggatgagttattagcgagtgtagactttttcgcgaaggaaccaagtctaataataatctgacccacctgcattttctagcgggctcaactatcgggaagcatctacggcaccactagatttcccaaagtccaacgactttgaccgggctaacgtttacgttggcccttttttgttgattattttaggaggttgcacattgattcaaatcgccataatcgtttttttaatcattatcgccctacttggtgcgattttatgttactaccaagacaagaagttcctactctttgatttaactgaaaaccggcatttaggtcgattgatgtacttttcagggattgcactcatcggtgtagcgatctgcggggctttgatttactggctattgccactagtctggacattggtgacgctcgttgctgccagtttaatcgccggcttaatcggccttagctttgcaactaacctttaagatttacttttggcactgaactagcgtacaataaagatgtaaaattaaatgaggtgatgacaatgttacaacaatacaagcacattttggtcgcaatcgatggttcttatgaagctgaactcgctttccgtaaagcagttgaagttgcccttcggaataacggacaactccacttgattcacgttatcgatacccgcgccttccaaaatatctctagttttgattccgcaatggttgaacaagtcacagaaacagctaagaaaacaatggacgaatacatcgtgactgccaatgaacttggcttaaaagatgttgactatagcattgaatatggcgcaccaaagagtttaattgcccgcgaagtacccgaaaagaaaaatatcgatctcatcatgattggtgcaactggtttaaacgctgttgaacgtctcttgattggttctgtaacggaatacgttactcggaccgccgtttgcgacgtgctcgttgtgcggacagatttagataataaacacgcactcaacaagaaacgcagtagcattggtcacgaagaagcataaattagcaatcaaaaagccgggacgcttatgtcccggctttttttagtggttaaccacttattcagccaattgttgatcaacttgcacaataatctctggatgatgccggattaacgccaatgttttagcaaccgttaaatcctgtaaggcgttctctcgatgaagcgcatgttctgcacgaccaagaatgaaatacaatgcatcaagtaagtaaagactttgcttatcgattgcttcgtcaatcgcaagctgagcgtacttaatcgcaccttcataatccttcaattcaaaaagaattcccgctaagtgattataaatctgcaactcaacttggaaatcggccatagcaagtggatcagaattctccaacatttcaacggcttgttctgcataaatccgtacacgctctaaagcgcccttcatcaaataggacttgctaatgccgataatacatagaataccgtaaacatccgtctgagaaacaacgtattgattgaaggcacgattgaaaaagaaaagtgcatcgtccggtttattctccagcaataacttaatttgaccttggaaataataataccgtttgtaatcatctgctttgaccagttgatctgtgtagatctgctgaatcaaatcacgtgcttttttgaattcattggtaaataacaatgcttgcacacgactcaacaagacgtgtaattgatcatcttcttgcacaatcactgagtccaacgtaatttcaagccgcttacaaatttccaagagaatctttgtgcttggcacctgttcttttttctcaattaagctaattgttgcttgcgtacaaatccccttagctaactccgcttgagacatcccccgtgctttacggatttgttttagtttatcccctaatattctcattttaaatactccaattacatcattatttaatttaaaattaatttccggaaaatataacccaattaagtaatttacatcaattagcaatgacgctactagttgcgtttattatacactatgaactagttatgtggcattacttatttttttatccaataagtattttacactacatactaaacattaccaaacatttatctttaattaattgttaaggtgctgttcgatagtacgacaaaaaaacggcttcctgcagcggaagccgttttttataacgttgctaatattgccggaacttcttttaatgattcaatttgataatccgctgccgattgatcaatcgcgaaaagtggatcaaatggttttaatgcgatgacggttaaaccagccgccttccccgcttgaatccccagtgcagagtcttcaatcgcaaccgcctcggttggttctaaatgcattcttttaagcgcttctagatacacatctggtgctggtttattatgcgcaatctctgcaccactaacaaccgtttcaaaataaggttctaacgcggtttccaacaacatttgttgaataattccgcgctcaccagcggacgccaaaccgatttgatatgtcggtgcaacggttgctaataacggttgcgcgtctgggttcatgatatttttaaaaacgattggatgagccgctttatacgacgtatagccgtttttaattgccgctcgttccaaaacagtatggtttggaaacaactgttttaaaacggcattcatattggaaccaatttgtttacgactttcctctgccgttagtcgtgcgccaattgcattcaaaaatgctaagcgttgttcaaaatagtacggttcactatccactaaaacgccatcgacgtcaaaaataatcccttttactgtcatcttctctcaatcctatctggttaattaaaataaatctgaaatcttccgtaagtaatccgcaattttatcaggtaattcaggttgtagcaacaatgactgtaaaaagcgattgcggttataccaccgattccaaaaaccaacggtctcctgtggtgccatagtcaacaatgaacgctgccactcctgtaagacgattaaacaataatcgacatagagttgatgcttgttcattaaactgattagaacgttcgtcagatgactatcttcaccatatgcgagtgcgttatcagagaagcgatacgcctgtagcacaattgccatcatcaaaatcttatccgcacgttggatttcaggtgtttcgttaagttctgaccagacattgatgatatgcgtcatcgcatgcgcccagcctttaccatcaacgtatcctcgtgaatctaattcgatgactgtataagccattactcgccgttcaattgccaataattcggccgtacttaatacatgataaaaagtgcggttagcatataaaatcccggccaaaaacatcgcgctaaacgaacgtaaaaaaacagcgtcattttcaggttctaaaatatgcgcgaataaataatcatcttgcaataagcggcccttgacccaaatcaattgggctggggttaaaaccgtctgccgtaataatcgattgaataagtaaaaaacacctttatcgcgcacttgcgaatctgggcttgcaagatgccttaataaatcatcgagctcttcatcgctgatggtcgcttctttgcctttggttttaattcgctcatcaattgctgtgattcgttgcaagactgactcgttgtcctcaggtactacgacatgtgtccgccgcgtcttatattggacgccatccatgacgaccaatactttttccggaattgattgatagatgtcccctttaatcaatgcactacgaatcgcgtctaactgttgcatcacattttgaacttccttcatcaatcatcacccactctctactgaaaacatctcataactaactattataatgcattcggccacagacataaactatcaatccttaaacaggcccacgatatgacaaaatcgtcacctcgcttagaataaattccacctttagactgaatcaatgtaacttctagcttgatacgattaagacatcaattcacaaggagtgtcaatcatgaaaaaaatcattctattactgttctcacttggactaattgttatcggcggtccaattatcggatcagccacaactcagaatatgacggacggcaatgaccttgcccaacagtgggaccggttcaacctcttaattcccagagaagccgtctatgttaaaacagcacaccaatacgggacacaacaagcacatggcgattacctttaccggcaacctgcttaccgtgctgatggcagtcattacgaagtcgttttccaagcgccgcgcgcactaaaacctaatcactacttaaaattagatgccaaggggcgcttcgtcaattcttggactgtcgtttcaaaatctgaattgcccgttaaactgcagtctagtctataattgtaaaatacaatcgaactaaatgctgttaattgcgaaatacaaacgagggatttcgcttttttcattgcttacatttaataagtatgctatattattcgcatgcactgataaaaacgatttcacaagggagtaatgaacatgacagaattattcgatttacaacaaacacgccggacaatttatgcacttggcaaaaacgtttcaatgagcgaagctgaattatcagaattaatcttcaacaccattaaagaaacaccaactgcttttaacgcccaaggttcacgcgccattattctctttggagaagcaaatgaaacactttggaacgatattacagcaactgccttaaaaccattaacacctgcggaaaacttcccaagtacacaagctaaattggcttcattcgccgctggtgtcgggacaatcttgttctttgaagatcaagacgttgttaagaatcttcaagaaaacgtgccattatatgccgaaaacttcccaacatggtcagaacaagcttcaggcatggcacaatatgccacttggttagccctcgcagaaaaaaatgtgggcgctagcttgcaacattataacccagtaattgatgaagccgttactgcaaaatggaacattccatcaaactggaaacttcgtgcgcaaatgccatttggttcaatcgaaaatccagccgatgctaaagactacaataccgatgcaagtcgtttccaaacctacacaaactaattttaaaccgaatcgaccagagtgcgcatgcactctggttttttattttacccaacaaaaaaagcgactcgcatccgcgaaccgctttttactttaaggagaatgagagattcgaactctcgcgtgggcagaacccacctgacggttttcaagaccgttcccttcagccagacttgggtaattctccatatcaaatcttacaacgtttattataatatcaagttcgctaatcactgtcaagcctgttttttaaaaataactgctatttacacccgcccaccaactcggtatcataaaggggtgcatttaaaatcaagtaaaactacttggactggttcggaaacttcccagaataaaaaactaaggatctcaaggaggttagaaataaatgcaaactcgcaaaatcattatcgattgcgatccaggcatcgatgacacgctcgctttgaatttggccattcaatcgccagcggtggaagtcgttgcaatcaccattgtttgcggcaacgttcccgtccaaatcggcgtggacaatgcctttaagtgtcttgaacgcctcgggcagctcgacattcccgtttatgttggtgcggataaaccgctccataaaccatttgtcagtgcgcaggatacgcatggcatggatggtttaggtgacagccatatcccgcgcctatccactattcaaccggcacaacaatccgccgctgattttttagcagccacttttagtcaaccgagcgatatcagtattatcgcactcggaccattgaccaatattgcgactgcgctccagcgaaatccagatttaggtcggcactgtgcccgctttgtttcaatgggtgggacctataagagtcacggtaactgctcacccgttgctgaattcaactactggagcgatccggatgccgcactgttggtattcgaccaactcgatcaaaagattgaaatggttggcttagacgtgacccgcgaaattgtcttcacgccaacattgctggcttattgtcagcgtgtcaatcctgaagtcggcgactatctaaaagccatcacccagttttattttgattttcattggcaatatgaacacattatcggctgtgtgatcaatgatccattagcagtcgcctattttatcgatccaaccctttgtcacggctttgaaagttataccaccgtcgaaacaaccggcatcagcattggccaaacactggttgaccggttcgatttctggcaccgtcctgccaatagcctcatcttaactaaggtggacaccaatcgtttctttgaacagtttttgaccgtcgttttaaatgcacaagcaaccctcattaaaacggacttaccaaaacttagataaggaacctattatgcgaaaatttaaaacacaacacttaaccattctggcacttgccattgcactcaattacgtaggcgctaacattgccctatttttacggttaccaatctatctcgatagcgtcggcaccattttagccagcaccctattaggtcctctggcaggcgcattaactgccacttgcagtagcatcatcagcggtgtcacgaccgacttatttgcgctttattacttgccagacggtctattaaccggcttactcgctggatggttcttataccaccaccaacggacgaaacgcgagttaccccttgttgctttaggtgtcgccattcccggcacaattgtcagttcattaatcacttacttcttgttccacggtatcacctcttcagggtcaagtttaattgtacaactactaagcggcttgggactaaatcagtttgtcagcattacactggttcaagccggtacggattatctggaccggctcttggcaatcattgtggtgacacaggtttgcgtccacctcaaacaaaaaatcaagacactctaatcaattaaaaaaaagcaagtgtgcttctaacatcaattagaaacgcatttgctttttttagttttgcatcagtaacgtgacatactgttctagataatctcggtcgacctcatcgtaagcgccaacgacgcggttatcaagatccaaaacaccgattagttgattagccttgatcattggcacaacaatctcagaacgtgcagccgaatcacaagcgatataattctgatgttgcgccgtgtcttctacaattaacgttgtttgctttgcggcggcttcaccacacacccctttacctagtgcaatgtgcatacacgagacgtttccttgaaatgggcctaaaatcagctcagcatcttgatacagataataacccgcaaaaacagtctccggtaatatttgatttaataacgccgaagaatttgctagattagcaattaaattcgtttcacctgccagcaaagcagcttgttgttttaagagcatttcgtaagcctcgactttagcttcttttgatttaaacatcacaatcacttcctcttttcaagctattatagtggaagcttgctgcgttagcaattcaaaacatcccttaatttcgacattaaaaaaaccgcacatcggcggtttttttaatgaaaaattgttttatttcttcgataaactgtctctggttcgccctcttcatgattgacgtaccgcgcaatcgcgtacaaataatcagagagccgattcaagaaagttaatacagcttcgttaatcggttctacttcctgcaaggcgacgacttggcgttcaacacgccgcgcaattgtccgacaatattgtagtttcgctgctgatggtactcccccaggtaaaataaattcttttaaagcaggtggaacatctgcatactgatcaatcttagcttctaaccatttcgtgtatgcgttgtctgtccgatacccccgcgaatcatccggcgtcgctaaatctgtcccacagtcaaacagaatttgttgaatctcaaccaattccattctcaatgccggataatcaggtaaatcactgatgacgacacctaagtatgaatttaactcatcaacacccccgtatgcttccacacgaattgcgtttttgcgcactttttgaccgccgataattctggttaatcccttgtcaccggtctttgtatatagtttcaatccgtagcctcctaaaactgtcatccattatcaattttagtgtaccacgtttgaaagcgaatttttggcgttgcttaatttttaacacttgtctgcttgtatcaatttaagtaatgcctcaattcgacggtacgaaacatcacatgtatcgccatttgtaaatatcacttgatgcgtctccttatcaatccgtacgactttgtccggattcactaggatactcttatgggctctgaaaaattgtggcaattgcgcttgaatcgtcacgattttccctacaaattcacttaaccgatgatcactgtgtaagaagacgtgccgtgctttatacgctgtttcgaaataattaatctcttgaattgccactttttcaaacgataatccatcatcatattcaaaatgagctggttcttcagctaatggcacctgttgttgtcgtaacttaatggcatcgttaatggttgcttgaatatctgcacgaacctgtgctaacccgcgatccttcaaaataaaattcaaaacattaattcggcgttgaatggtttccattaaaagttcgtcatgtgttgaaacgaacacaatctgtgcatatggatccaattcacgaattttaagcgccaattccatcccatccagcacgtcattctctaaatcaatatcaagaaagtaaacgcccccttgcgtttgactttcttgtaaaaaaattaataggtcatagccattcttagtcttcaaacgcacctgagcatccaatatattttgttgaatatatgccgttataatctcttcataactatctagtaaaacctgtttatcatcacataaaaaaatatcaaccatgggtctcctcctgttcaacaacaagcattgcaacgaaatagtctccatcttgttttaacattaagctaaaatctgagcgcatatccgtgatttctttagcagttgtgagcccaagcccgcgattaatccccttcgttgaataaccagcctgataaagctgaccaaattctactggtgtattaatcgtatttttgacacaatagaccatcttacccttttgctcgaataaactgacactgattgaaccatctttaatatcatttaccacgtcaattgcattatccaaaaagattcccagaatccgtaattcatcaaaatactgttgttgcttaaataaatccggttgaacctctaaattaaagggaatccgattattatgtgcttcaatatacttgctaaaaataatgcctttaatataagcattattaatctcttgaaaccgtccaattgcctgatcttgaatcgtgtcaaagttataatgcgttagtaaatcatgaaaatcctgcattaaaactgggctcccttgttcattgataattgtctctaaagccaataaagcattggcgatatcgtggcgaaacttgcgtatttcacggtagttacgctctaactgttcaacatacagcgttagatttcgctgactttcttgttctacgttgattctattttggcgaatcacagctttcgtatacaaaagcattcccacaatcaccaaaactaatagtaatagcacaagtcctaacacaaggtacaaatattcaaccggcagattcgcatgcttaaagctatcaaaaagcaccatcactgccaccacaaataacgcgagaccggctaaaatcgtgccggccacgcacataccgtatgaagcaatggatactttaataagctgatctaaccgttggacaattaatcctaatccggctgcaatcaataattgactcaacataattaaacacaccatttgccaattaaactggctactcatcagattatcaaggccctttaagtgagtatacccaattaaccccaccgttgtcagaaccgatgatagcatcacgatgatgtaactaaagatggttgcgataattaacgcataacttgtctttaatttacgcagatttttaaagccatttaaccaaccatataatccaacagttgccaaaatcagccatagctcttcaagaaaatttccaattaataaatccattccctgaacaaaagcaatgccgactccaactgataatagtagttgaaatctgttcgttcgtttcaacttccccgtcaaaaataatactaatagtagaaacgaactaaacgtacttagattaatgacaatctgcattgccagcggcattttcattgccatgcataaaactccctactcgaaccttaattccaaaaccagaaaattaaattttgaatgttactcatcattatcatacccctcctttcatattatgaatacccatgattggtgactcatttcgattttatcacgtaatttttttaaaaggattaaatgtcataaacgtatacttgtctgcattaaacgtatataattaatcataaatatagataaataattactatttggaggctaaaaatgtttttaggccaattgatccatcaacagcgactcaacaagcaactgacacagtctgaattagcagcggggatttgcacgcaaaatacaatcagcaaaattgaaaagaaaaatctgccccccacaatcccaattctaattaagatttgtacacggcttggattgacattaaatgaacttttcaccgaatttaacgcgctcgacactgccagtgacgaaggcgtgatttctgcggaagttgctttattagcaggcgattctggccctgctgccgcattaattaccgatatcgacttcaaggcaaccgaacatccttatcccgccatcttcttctttttcaatggctatttaagttaccttgaccatcaatctgaattacagattttttccgcttataactcgttcacagcggccatcggtgacgacacttcaacgttgaagttacttctaaataccggtatgggtttaatttaccaagaagctggcgaggaattagctgatttttatttcaataataatatcaatttcatcaaccaacttgatcacatcaatgtcattgatgttcaacgcgtcctatttgcttcgcgtcacacagcagcctatatgattaaccaacaccgcattgatgcagctatcgagtttttgacgaaagccctcaaactgagtcaaaaaaatcaaatcatcaaacaagtcgatcatttgtattacctccgtgctcgggcgcgccaacaaagcggtcgagactatgcagaagatcgcgaaaccgcgttagtttttgccaaataccttaaaaataacgcgttaatcgctaaaattaaagcgttaaactaaaaaacactatccgattggatagtgtttttttaactaattggttgaacgcgactggcaatcatcaccactaagcaactcttgatcatttcaatcggaaaatacggcacaaaaccggtcattaagccggtcactacggataattttaatgaccagattagccagagtgtgccaaatccgagttgaataatgcttgctagcacattgccgccgagaagtacgcggttcgattgtccaaatagttgctgactatagtgaacaattgccacataagcgataaagcctatcaggtagccgcctgttggtccgaccagcactgcagtcccactggcataatttgcaaagaccggtaagccaagcatgcctaacatgagatagctcccgatgaccagtcgacttaagcgccatggtaacgtggtgccaattacaccgactgcgagcgtttggagtgttactggaaccagcgaaatcggtagactgacttgagcgctaaccattaataacgccaagcacatttcgactaagctaacttttctggcaaccgatagtgtcatttaaatcagctcctccttaaaatcaatcttttggccgactgccacttgcgagtcatcgctcaaaattaacgtaccatccgctagaagctgtgtaatgacaagcccattttgcagacgtcggccaataatcgccgaccagttgcagtaatgagcaacaatcgcctcgtccgcttgggccaatccggccgctagtcgattaagatacgtggcacaaaattgattgatgttcacttggtgggcgtttacggcttggcttacatccattatgaaactgccgctgccgtcctttttgaatatgtgcatgctttctacaataggaagagaattcatagttcactgggctaccagacccccttacaagttgaaattgcaacacttacgagccaaatggccgcctgatttaatgctttccagggttcaaataagttattaatcgcgattaatgatttatttgagctgtggaaggtaaacgcggttctgaatgtctcttaaaatctgtctcaaatattgacttcaatccatatctcctataatttttattttatcataccatttaatactgcatactagttaaatctctctaaaaatttctatccaaatggtgttacttttggtgttactttctacatgcacaaacaaaaaaagccagaaacgccttcaaataagcatttctagcttatgcaattcaattaccccacactgccttccatttcataactaatcaatcgattcaattccaccgcgtattccattgggagttccttggtgaatggttcgacgaagcccatgatgatcatttcggttgctttggcttccgagatgccacggctcatcagataatagagttgttcttcagaaattttagagactttggcttcatgttccattgagacgttgccgtttagaattgtgttgtacggaatcgtatcagagctggagcggtcatccataataatcgtatcgcattcgacatgggcaaacgaaccgtcactgtcgcgttcaaaacgaacagtcccgcggtaatcaacggccccgccatctttggcaatcgattttgaaacgattgaggatgacgtattcggtgcagcgtgaatcatccgcgcgccactgtcttgatcaacgccttcgccggcgacggcgattgagagcatggttccgcgggcaccttcaccatcgaggtagacacttgggtatttcatggtcatcttcgaaccgagattcccgtcgacccattccattgtcgcattttccatggcttgggcccgtttagtttccaagctataaacgttctttgaccagttttgaatggtcgtataacggcaatagccatcccgtttcacaaagacttcaacgaccgctgcgtgcaagctatcacttgaatagcttggtgcagtacagccttcaacgtagttcacgctggcgccttcatcgacaataatcaatgtccgttcgaattgacctgaattttcggcgttaatccggaagtacgattggattggaatatccgtccgcacgccttttggaacgtagatgaacgtgccacctgaccaaacggccgagttaagcgctgagaatttattatcagttggtttgaccaacgtactgaagtattccttcacaatttcagggtattcgcgtaaaccggtatccatatcggtaaaaatgatcccaagtttttcgaattcttcacgcatgttgtgataaaccacttctgattcatattgcgcactggaacctgctaaatacttacgttcggcttcaggcacacctaagcgatcaaacgtttctttgattttgtcgggaacatcttcccaatcgcggtattgcttgtccgttgccttttgataatacaacatgtgttctaaatcaagatcggataagtccggtccgaaatctggcattggcattttttcataagcgtgaaatgattttaagcggaaatctaacatccattgtggttcctttttctcacgcgagatggcgcgcacaacgtcttccgttaaaccgcgcccagttgaaaagacgggctctacatcgtcgctaaagccgtagtcgtactcttcaaattggggcatcgttgtctcttctgtcattcgttagtttcctccgtttctgcgtggttcatcatttgaccggttgttgcacgtcggtcatcgctatttaaggctttgtggagcgccttccaagctaaagtcgcgcatttaatccgcgcagggaattgttgcaccccttgtaaaatcgcggcatcttctaacaatgaccagtcttcgtcacgatcaccaatcatcatatccgaaaagcgttcgatcatcgcctccgcttgcgccggtgtcttatgcatcacggcatcggtcatcatgctggcagaagcctggctaatcgtacagccttcccctgaaaaagcaatctgactaatctgcccgtcttcgagcaccagttcaagttgtaacacatcgccacaggtggggttgcgtaattcaatttcatgatcggcagtcgtcaagtgaccatgatgatgcggatgttgcgaatggtcaagaatgacctgccgatataagttatctaatttagagagtgccattttggaaaaactcctttgctgcttgaatggcggtcacgaacgttttcacgtccgcttcggtattgtagaggtaaaaactagcgcgcgcggttgcggcaacgttcaaccattgcatcaacggttgtgcgcagtgatgaccagcacgtacggcaacgccttccatatcgagagcggtcgctaaatcatgtggatgtaaattgtcgagattaaaggcaatcacaccggtgcgttgggcggcatcttgtgggccataaatcgtgaggccgtcgattgcttggagctgcggtaaagccattgtgactagcgcttgttcatgggcttggatatgatccatcccaatttgcgttaaataatcaatggcggcccctaagccaattgcccccgcaatgtttggcgttccaccttcaagacgccacggtaattctttaaacgttgaagattgtaagcccacaaagtcgatcatctcgccgccgtattccacgggtggcatctgttcaagtaatgcttgcttgccataaagcacaccaatgccggttggtccaagcatcttatgccctgaaaaggcgtaaaagtccgcatcaagtgcctgcacatcaaccatcatgtgcggcacggcttgtgccccatcgaccaccatgtaaccgccttgtgcatggactaaagccgcaattgttttaatcggattgacaaccccaagtacgttggaagcatgcgccaaactaacaattttcgtcttaggcccaatcacctggcgtgctgactctaaatcgagttgcccatccggtaataagtcgatgtaacgcaatttcgcgcccgttttctgcgccagttgttgccacggcacgagattactatgatgttccatcacactaatcacgatttcatcgccggcttcaaccacggttggaccgaaactgcctgcaacccagttcaaactttgcgtcgtcccttttgtgaaaatcacttcggcactcgcagcggcatggatgaaggtttggaccttcgtgcgcgcggcttcatactgggcggttgctcgttcagctaaagtatgcacaccacgatgcacgttcgcattgtcattttggtaataagccaccaaccggtcaatcacggcttgtggtttttgggtggtcgccgcattgtctaaataaacaagtggttcatcattgacgatttggtctaaaatcggaaagtcgcaccgataatcatttaactggttgaccatcgattaacttcctttcaatcgtgtccgttaattgttggcgcacgtttttatccggaatttcacttagaacagcgcctaagaaaccacgaattacaagtcgttgcgcgacttcttttgaaagaccgcgactcattaaataatacatttgttgttcatcaacgcgcccgacactggcagcatggccagcttgcacgtcattttcatcaattaataagagtgggttcgcatccccgcgtgctgtccgcgataacatcaagacgcgattttcttgttgggcatcggcacccttagccccttttaaaatatgcccgatcccgttaaacgttagcgtcgcatcttctaaaatgacgccatgttgcaagatgtgcccaattgaacgcggtccaatattcgtcacacgcgtatcaatcccttgaatctgtttaccagttgagatggcgaccactttcgtttcagcatgtgatccagcacccactaaatcagaatcaaagtcaccgatgatattgccatcattcattgatcccaatgcccaatcaatccgcgcatcgcgcatcaagtggccccggcgattcaagtaagtcgtcacggattttccaaaggcatcaaccgctgaaaaatgaacgtgactgttatctttagcaatcacttccacgacaacatttgctaagttcttgtggtcacccgctgtttggagattttcaagataactaaattcactgttttgttcggctactacgaggacgtgatgaataaaatcagcgggttgagtgctgtcctgtacataataagccgtaatgggttgcttaatcaccacatttttcggcacatacaagaagagcccactgttcatcaaagctgtgtgaaaagccgttaagcgatcctcgttcggtttcactgtgacttgcatgtagtattgttgtaccaaatcaggatgttcttgtaacgcggtgaaaatgtcggtaaaaatgacaccttgttctgccaattctgccggtaaatttaacttggcagttgtctgaccaatctgtactgcgtacggttgatcagctgaaagattcgctgccgcagatggcattaaactcaaatcggatttaacggctgttggcgcatttgctgccatcactggccaatgtttatagttaattttttcaaagataggcagttcgagttgctcaatttgcgcaaacgctgcttgacgcatttcagcaaaccaggccggttcttgatgcaattgtgagaatgacgcgatttgttcaggcgtgatggctaatgttttcttcatcagaatcgccccctatttactttcgtcgtcagtcagtttgatatccaagcctaattcgtcacgaatcccgacataaccttcgtcttccaaacgttttgcaagtgacgcatcaccagtcgtgacgattttgccacccatcatgatgtgcacataatctggcacgatgtagtttaagagccgttgataatgtgtgatgattaatgagccaaaatcagccccgcgcatttcgttcacaccttttgaaacgacttgcaaggcatcaatatcaagtccggaatcaatttcgtctaggatggcgaatttgggttcaatcatcatcaattgcagaatttcattccgtttcttttcacccccagaaaatccttcgtttaagtaacgttctgacatttcttccgtcatatccaagaatgccatccgttgatctaattttttcaagaaagccatcactgaaatctgatcatcttcagcccgacgtgcattaatcgccgcacgcatgaattcagcgttcgttaccccttgaatttcagcaggatattgcatcgccaaaaataaccccgcacgggcgcgttcatcaaccggcatttctaaaatattttggccatctagtttgatctgaccttgtagtacctcatacttgggattgcccataatcgtttccgaaagcgtcgacttcccagtcccgttaggtcccatgatcgcgtgaatttcacccgtgttcatttccaggttaacaccttttaaaatttccttaccgtcgatgccgacgtgcaaatcgataatctctaatttagacatagatgaccctccaagaatcgcattctagcaattattatacgctcttaattctatgctaattgagaactgttttcaatgcttgaatgcatgaaaaaagaccacgcggacaacgtgatctttttcaatagattcgcacgggaaataggttaatattactcattgatttgatactcttctaaaaccgttgagccatttggtcagccacaataccggttgaactactcattgatttgatactcttctaaaacattaattggcattggagtttaaaggagtatgttgaactactcattgatttgatactcttctaaaacttgagcgtcaatcaaaacaacccgttatttgttgaactactcattgatttgatactcttctaaaacaaccatgtgttagattgaaaatgaatccttgttgaactactcattgatttgatactcttctaaaactgtttgtaattttaaccatgtccattatttgttgaactactcattgatttgatactcttctaaaacgctgttgctttggcgtcgtcaatatcataggttgaactactcattgatttgatactcttctaaaacccacctttttaagtttaaacgcttgctggtgttgaactactcattgatttgatactcttctaaaactatatttataataccatgtggcttttggctgttgaactactcattgatttgatactcttctaaaacgaggcaaagcatcatgtccattgggataatgttgaactactcattgatttgatactcttctaaaactgtctccgctatctttccaattaattacaggttgaactactcattgatttgatactcttctaaaacctgggtaacgtttaagaatctccttaaccggttgaactactcattgatttgatactcttctaaaacagatgttacaacccacttatttccaattttgttgaactactcattgatttgatactcttctaaaaccgttgttttttcatcagaatttcattttattcatagcgccattcgacataatcattatcgatgtgataataacaacatttctggtactgatcagatttaacctcttctgaaaattcaatgagaaagagtttcacattcaatgtcgccaccaacctcaccaattcattaaattggttgatactgagatagtgcgaaacattgatcaacgtgattatttttgattcatttaactctactgctgtctgtactatactctcaattataccatatgggtcatgttggacgacagtcgaaaattgtaaattatagaacttaatcattctttgaagatcccattcctgattgacatctaaggtcaattcatacataaaggccgcatccaaaatcgttgaacgaatctcactatctaactgagttaatttctggcgctgctgatccgttaagtcggcggcgaattttttaatcaaccgattttgaaatagatgattcaaattaattgctgccacatccccaccccaaataacagcctttgaataatccattaattcgtattgatcattgctaaatttaacggtctcttgtgcgccggacattccaataatgagtttggtatacacttctggactacttgtactgcaaaccgttattttcttattctgaacgctaaaggggtggtatggataaaaagtaatgttcatagaattaacgtcctctcagcagaattacggacgtcatcactcgattcgcccactaagaaatgcattttattatattgttgctcagtaaccatcaacgtttgtactaagcctgcaggcggagtaaagccagcaattcggttctcgataaactgcgccgattatttgctgacacaaactcgaacataaacagaatattgaatcattaaaaaaccttcgttaagcagcgcttttctaaaatgacggtatgccttgcgatcctcgctcgtttcaactggtaaatcaaacatgactaataagcgcattattcggtacctcgtgagtcattaccacctttacttcaaactcttctttcggagttgtcatgaatttcaaacaattctgtacgtgtttagtgagtgcgtttctaagaattgtgatctgtccattatattctagctcaagattcagtaactccactaaaccaaatttaacatcaggggttaattcattaaacttttgatgtgccacccaataatcaatcactggtcgaaaaggttccattagatcggaacccaaattaaaatcactgacgccattgtgatgatgaatgccaaactgtgttaaatagccattacaaacaatttcgcgattaacggctgataacaacaaactataaccataattaagggctgcattaatgggactgtactccgttcgaacaaagtctttatcaaaaactaactgaaaatacttgcgcgcaatcacggcttctcgatttgttcgatcagcaaataccattgcatcagcttctgttgttaagtcttcaatatcctttcctaacaattgtgcacattgaatttgcatcgctattttggcttgaataatcgccgtccataaggtttctttcaaccccgttccccattcaacctgttgctggatcgacgcgagactacgatttcctggataatccgcaattgtttcgcaagttggattaccgtctttgcctgtaaaaataatcttagcgccagcttcactcaactcagtaatcgccgatgccgttaaaacggcctgggtagtcgcaactaacaaaatttggatatcatcaattggtacttggtgtgttgcatcttttgtctggacaataatcttccgtccagaataagaaacctttgcatgttgtgaaatcacaactgttcgccaactcataaaaatttaccccctacatccttgttttcaaaatgatgacatgctataatgctgttgttgagcttgatacactcaatcgaaatactcattgatttgatactctgagttaaaatcaaacaaggtcttcggaccaagttttctattctgagcctcttatgaggcctttttttatgccttcaaaccaaaaagctagcccatcattacactaatgacaggctagctttatttatttataaatcccttaaagctactcgtcgttcgaataaaccggttggagattgatagataatttgggtatcaggtgaaagagaaatccctgatggttgctgcatttgacctagtggcgtacttattttcaacacccctaagtcgataactgccgcatttgcatgcaatccaattagaactctatccaatataacttgttgcccaacctgcaccatcttattaccatcccattgactcttccacggtaacttcataaaggctgctttacccgcagataatttagctctgaattgattagtatcatacagtggaaaatagtgcatcacttgatctaagatttcatcataaacttgttcagcgagttcttcagactgtgttaaaggtagcgcgccatttaataatttaacagccgttttatcgagaatcagttcctgctcgttgtgtttatacgtcgcagagcccaatgtcaattcttgaccattatcgaagaaacgttgattgattaggatatgtggtgcaatgacttcaaagtcttcgaccactttcacaatcgttcctttttgttttttcacttttgtaaattgcggactaattttttgctttaagaatgccttttgtgagtcttcatccgtcagttgtttaagttgcgctaaccaacttgtctcaacaccacagactttatagagatcaccctttttatttttaatgcgtacaatacacatgtaggcaacggtcttccctgagtacccaccatagagtgcagttggtcgatcttgtttagcgggaatcaattgcttgccgccctgcccacttgctttatcatctttagccgcatagagcgtttgattaaatagcgctcccgaattttcatgcacttcgcgagtcactagaatcttcttaaactgatatattttattcaaataagctagaccggattctttatcccaaataaccgcttcagtattttcatcaaccaattcgtctttctttagaccatttaaaaaattaaagttacgccacttatcttgctgacttgccttctgatactcaccgtatacaaaataaggttttaatttaggatagcgcttcaatagatacagaccaacgaatgcggtcagataagcatcgaatgcatgatgatggttatttagattacgattcttcggaaaatcgaattctgttcgcatttgatgggttaacccactcttaaccgtaattaactcaatattgtcttcaccatattgttccatcaatagatttgtcgctaacttaatgacttggcgtgtttctactaattgccgattaataaagcccttcatggcgtatttactgatatgatcaggatttaacgttaagttatcgtatttcttcttagtaattaacccagcacgcaacatttgttcccactgaagctgcatcttcttaccaagttcaacgcttgtaaagtcggtcggtacttgatctgctttgctacggttcattttttgagaaactaaaactcggttatctaacgaattatccttcacaaacgactgtggcaagatatgatcaatatcgtacgtcgataaacgatcaatattcaacgaatcacccgtatacatatcccgaccaccctgcatgaagtacaagaataagcgcgtattgctcaatgcagaattcgataaatccttaagttcatttctgatttcagtattatttagcaattcattgctgatattttgatagacttgttcaacttggcgcttacgttgcaccgaaagtcgtggattcacttcatcttcgcgcgcaaattcaatcaatatccgttctggcgcctggcctttcatggccttttgaatgtcattgacaacaagcagaatctggcggagcgcttttttattctgtggtgacgtatataaatcattgataacatcttgtacatcattttcagctagcatcatttgattagcttcagtaattaatttatcaaagtcttcagagtgcacaatccgcatgaagttatccgttgtatcccagagtaagtccataattcgttgtccattcgcattgacgatttgcgttaataatttagccgacaaacgaccccaaccgcggtagcgtttagcagctaattgcacacgttgctgatccgttaaccaatcgatttcattcaatttggcgctatatattttgccgtcttcaaaaatcgttgaccattcaatacatttttccaaatcggcttgtttatcaacatcatcaaccgcatctccaacaatcttctttaagtcatgatacgtgcttaatcgactattaaatttgttctcatcggatagaccagtaattgcgggacgacttgcatagcgcttttctgataccaagtaatcctgaatatttttcactgttacacttattttttgcataaataaatccgtaaatattgcttgtttcaactccgtcgtaatcggttggtcatcaatcttaagtccgtttaattcattcaacacttcaaaccgttgataaattaagctctgtttagggagtacatcttcagccaataaataagtatcagtcgttgtcatgcgcttaatgaattcattagcggatgcttgacggtccactttatcatcgaagttccacggtgtaatccggccttctgctttacgaatcagccacgcaaatttcgcatcggagctttgtcgttgctgctcagccgtaatcaggggccccacatagtatggtactctaaaggccactaattcgtccaatttatatttagcgactgtttgccgtttagaattgggattaagttccgctaaccagggatagtattgttgttggttctcaataatccggtctaattcctgttgatgtagttgatgcggaattgccccattatctttggtccgttgttttggcataaattgatcaagttcaattaattttttaatttcactcacaatcggatgatctgggttgttctttaaggcttttgtgatatctccgtaaaaatcttccttcgaataggccttcgtattttcttgaccatcaacatattggtcataagcctgctttaatctctgtcggtctccaggtgctaacgcttcccgtaccgcttttagcatttttaaatgcttttgatgatcgtcatacttcgtgatcatcgcttgcgacaatgattgattttcgggaacgattcccgccaatagaacaccagaataaagttcctgtaggctttcgataatttgatgggcattatcatcaagactactctctaacttgaccatttcttcatcaaagttttctgcattaaaagtgagtgtccatgctttaacatcttcggcttcgatcccagtaagcacattaaacttcgcttttaaccccaagattgcttttaataattctgtcgcaatcgccttattctgcttttcaactgccttattcgtacttggcgtataaatcagtgataatgcttgtctttgccgattgctagcactttgttgattatccaataagagcgctttgacctccgccaatttatccgtctctagttgaaagccagattcactgaacaagtcagcaaaaatcgtgtttagtctgtcaaaatgagccactaaattaatttcgctactcttaaaggatgagacgggcgcttcatttaaaaagtgcccgcgatacttcacaatatgatgcatcgctaaataaatctcgcgaatatcaaattgacgtttctcggtcattagcctatatcttaaatggtaaatcgttggataatcgtcatagaatgcccgatctgttcgatcattaaataaacttgtctgtggatgtaactttcgctgatccttcggacttaggtttgattgtttttgccgcaagaaaaagtatcatcaaccggcgtgatatagggttcaaagatttctcttaacaatcctaaccgccatttacgtcgttttaatcggcgacgtgttgttctaaagctgcgccgttctgcggctgtttgtccttcatcgtataaacgaaccccataaccatatttacctcttacactgaccaacttactttggtcatcaaccactgaccacccaattgaactagtaccaatatctaaaccaatattatacggacgactcattcttactccccctaaaagtttatattcaatgatagtatatccaatttaacccgctttttccaattaaattaagaattacacatgctaacagcaaaaaaagacaagtcttaatgacttgtctttgatcattattcaactggtaacactgcgccgtgccatttattcttaatccattcttgcgttgattttgatttgagcgctttaacgagcttcttgatagctgggttattgcggtcttttttatttgtcacaacaatgttggcaaatggcgaagattgcttttcaagggccacagcatccttttcagggttgagaccggcttgcacagcatagttcgagttaatcgccactaaggtgccttcatcattcttcaaaagttcaggcatgagttttggttcgaatgtgtactcaaacttgaggtgtttgggattgctagcgatgtctttaaacgttgcgttttcagcatttacgcccgatttcaaggtgattaagccaccgtcttttaaaattgttaaaacacggccccagtctggctggctgcttgaaactaatactttcgcacctgatttcacatcactcaattttttaacttgtttactgtataagccgagcggttctaagtgaatactgccaacactgactaagtcgtagccgttatctttattggccttcttcaaaaagggtttgtgttggtagtagttcgcatctaattcgccactcgctaaagctttattgggtaaaacataatcgctgaagacttttactttgaggttgatgccttcttttttcaactccggttgaacgtgtttcaaaatcgcggcgtgtggaattgcggatgccccaacgacgattgtgttgctgtctgacttcgcttctttgttaccacaagcggcaagtgcgcccgctaataagaagactgctgctaataatcctaaactgtgttttttcatgaaaactcctccttttaaattaacgatgatcaatgtgttgaacaaccaagtcgcccgttttttgacaaatgaagacgatgattaaaataatgacggttgcgactaacgtaatcgcattttggttagcttggaacccatcttggtaagcaagatttcccagtccaccggcaccaatcacccccgccattgcggtataaccaacaagtgaaattgcggtgacggttaagccggaaacaagcgccggcatgctttctggtaaaaggacttgccagacgatttggacttttgaagcgcccattgaacgggtggcttcaagcacaccgccatcgacttcccgaaaagctaattcaacgagtcgtgcataaaagggcgcggctgagatgattaacgctggaatcgcagctttcgggccaatcatcgtgcccatcaagccttttgtcaatggaatcaacaagacgattaaaatgatgaatggaatggaacgaaagacgttcactaataaagccacaatgccattcaacagccgattcactcgaccaccactcgcgtttgtttgataaagaactaacccgagtgcgaatccaagaactgccaccaataaaacactgacaattgttaaccaaactgtttcaaaagttgcttgccacatacttggccagttcacttgcttaaattgaaaataggattgaaatccgtttacgttatccatgacgtaccacctcaacttcgattgtttgttgtgctaattctgcaaggactgcctttaaatcacttggattagcttgaatttgaatgtataaatagccaagtgcgccattaatggtttgttgtaaactcccactgatgacactgatttcgactgctgggtattgacgcatcaagcgaccgatcaccggttgactcgattgttcttcgttaaatcgcagttggacgattgtgccatttggaacccgttctaacagttgatcaatcgaagcggccgtttcacttggcgacaccactaaggattcagcaacaaatgccttggttgcagccatttgtggtttttcaaagatttcgtgcacagtcccttcttcgattaaccgcccattttccatgaccgcaattcgttggcaaatccgccgcaccgcatccatttcatgggtgacaagaacgattgtaatccccatttcacgattaatcttagccagtaacgttaagattgaattcgttgttttcggatcaagggcgctagtcgcttcatcacataacagaatcttcgggtcactaatcaaggctcgtgcaattgcgacccgttgtttctgaccgcccgatagttcgcttggataggccgcttctaaatgggtcaattcaacaatctttaataatgcgcgggctttgatttgtcgttctgccttaggtaccccggctaattttagtggcaacatgatgttttctaacactgtctttgaccagagtaagttaaagtgttggaaaatcatgccaattttctgccgaatcggccgcattgcttgttcgctcaaccccacaattgactggccctcaacgagcacatccccagtcgttggcttttcaagtccattcaagagtcggatcaacgtactcttaccagcgccggaataaccgataatcccgtagattttgcccgcttcaatgttcaacgagacatccgttagtgcggcgaatgttttttgttctcgctcaaaggttttacccacttgttttaatgtcaacatactaatcgctccctcttcttttaaaaaatgccaaaaaaaaaatccttcctctcaaataaatgagagaaaggacgctaaatgcgtgttaccaccttaatttacgattacctcacagtaatcgccttacaaagtacccgattgatactcgttcgctatatcgggcaacccccgcattcggctcagttaaaccttaccaaatgaattgctcaaagaccatattcatctagctttcacattatccgcttgcacctgaccggactctcttaaaatgctactgactaaattactcatcttttcatcgcttgtattaagtagtacctatcataattaaagttcaattaaaagtcaagcaagactattcaaaaaaatcagattattgtttaagtaatggcctaatcgacccgaatgtcagcaatccacgcatctttttcgttatctgcatttaataattccggattatcagctaacggtgtgttgacgtttactaattcaccagctagtggactgtcaagatcttgtaccatcttctcagcttcaatggccactaaggtttcattagccgtcaatttttgccccacgattggaacatcaacaaacttgattaacccaaactcattttgtgcggctttggtgatcccaattcttctaatcgatgctgcaatttcctctgtccaaaaataatcattattattcatcgtcatccgtcattcactcctagaaagtatcttcagcttcactgaacatgtaactcttataatggtaccgcatcgacatgataaacccaacgccaattaggttccccaataatgacgagcccccttgtgagatgaacggcaatggaatccctgtcaatggtaataaaccaacgctcatcccaatgttttcgaaaacatggaataagatcatcatgatgaccccagttgagacatacgcgtaaaattcattcttcgtatcaaatgtgacccgaatcatttggtaaatcaacaagaagtacaaaagaatcacaaaacatgaaccgacaaagccgaagttctcaccaatgacagagaaaatcatatcggattcacgtactggcacatggacttgcacttgattgaagcctttcccaaatagctgaccagacccaatcgcttttaaactctgcgataattgtaaactggtactggcagtattatcaaaaggatgcagccaagcatcaattcgattgaattggtacgttttaaagcccagatgcgtcaagattacccggccaggggtcgtcgccgctagtgtaagggccgtgcccccaacagcgactaagacagcaatggctggggctaaaatcttccaggtcacacctgagacaagcacaatcccacctaagatggcaacgaacactaataaggtcccaaagtcattttgtaatttcaataggaccatcactggaagtgtccatagtaacattcgtccaagtaacatccaatccgtcttaaccgtgtgttctggataagccgtattgtgttgagtaacgaccctgcccaacatcaaaatatatgccggtttcatgacttcagatggttgaaatgagattggtccaagagagaaccaactctttgccccagtttgcaaggcgactgcccgattataaaagattaaaacggcaatcaagaggaaaatccctaacccataagccagtggtgcaatccgccatagttgttctgaatcaaactgcataattgcgacaatcgcaattccaccaatcacgtaccatgcagcttgcataataacggctcgagttgaactcgcacctgatgtatcatgtgacgttgccacatagattgacatcaagccaatcaacgctagcataaagactgaaaagacgattccataatcaactcgcgaggaatcttctgttgtttctacttcctttggcatgctaagtctccttcaatcaattctgctctcattatataaataacccggccagaattctgccgggttactgtaattctaattaattcttaagaattaaccttggtgtaagtggtactcccgtagtaattcgttaactgcatcgtcgtgggtcttagtaatgatactttgaccagtcccttcaacagttgcttcaaaacgtttcttagcgctatcttctacaatcacgccaatttcatttttgccgaccatgacgcttgtcatttcttggccattacgtttgatgtcatcaattgtgacagtaattttttgttctttttttgacatagttatgttgaacccctaacttctttgacttacttttgtgactcgtcttgctgtcgattgcgcaaaacggtgaaatgatctggtactggatcatagccgccccgtacaaacgggtgacaacgcaatatacgaccgatgcccatgattaaacccaaaatagcaccatgtttttggattgcttgaatcatgtaactcgaacatgttgggtaatatcggcaactcggtggtaataatggtgaaattcccttctgatagaaacggaccaatccaatcaatattttccgcaatttatctacctcactttagcgcatgctactgcaagaaattaataatatgactccatgtgctaggcaagaaaacggcaaatggattctggccgccaattgcaaaaccaatcatctgaccaactaataacgcaataattatgagcacgaaaaccaataaaattttctttaaaacgggtttgacgtgttcgtcaaaatttgattgatacacacaatcacaatccttctttaatagaatgcggcttaataagcgcgtttatgttcaatattatctaataagatgccagtccctaaagcaacagcatccaatggattttctgctaagaccaccggaaccttcaaatgttctgagaataagctagcgatattgcgtaataaagcaccgccacccgttaacatgattccccgatcaataatatctgcagataattctggtggtgtcacttctaacacttctttggcagccgcaataatttccatcattgtttcatgcaaggctgattcaacttcatctgcactaattgagacagattgtggcaacccacttaccatgtcccggccacgaatctcaagtgactcactcgcatcagcatgccaaacgttaccaattgttaacttaattgtttcagccgtatgttcgccgattaatagattatgtttcttcttaacgtatgcggcaatttcactattcatcttatcgcctgcaagacgcaatgaacgacttgtgaccacttcacccattgaaagcacagcgacgtcactggtcccaccaccgatatcaataaccatgttaccgcgtggttgaaaaatatccatgccagcacctacagccgcgacttttggttctaattccaagaagactttgccgccacctgatttttcagcagcttcaacaattgctttttgttcaattgatgtaatatttgttgggcagcaaatcaaaatattaggttttgataggaagccctttacatttaatttattaataaaatacgctaacatttcttctgtaatgtcgaaatcagcgatgaccccatcctttaatggacggacagcgtggatattgccaggtgtccggccaaccatccgatacgcttctgagccaactgctaaaacttttttggtttgggtatcaatcgcaacaactgaaggttcgtttaagacaatgccttttcccttaacgttaattaagacgttggcagttcccaagtcaatcccgatatctttagccatttggtgttgctccttccgagaactatattcagtaaatcattataccataagacaggtacctttagtatcctgatttggcaaaataaaaaagcgacgtccgctgaaatagcaggcgccgccagtctgttttatgcacgttttgcttgtttaatccggtgaccggcagcatcaaaatcagctcgactaatatgtgccccaagtgcccgtaatttttgatggaaatgatagtaaccccggtccatgtattgaaggttcgtaaccaacgtttcaccattagctactaacccagcaatgacaagtgctgcggcagctcttaaatcggttgcagccacttcagccccattgaaatgtgtatcgccataaagcacaactgattgaccttcaatttgataatccgcattcattcggcggagttcttccaaatgcatgaaacgattttcaaataccgtttcggtcataacactcgtcttcttagcaagtaattgaagtgtcgtcatttgtgcttgcatatcagttggaaagcctggataaggtagcgtcttgatattacatgcctttaattcagcgggaccaataattcgaacaccagcttcttcgtcaatcacttccgcacccatttccactaattttgataggagtggtttattgtgttcagcaatcgcttctttaatcaagacatttccttgtgttgccgcagcggctaccatgaaggttccggcttcaatccgatcttgcacgatactgtgatccgtcccgtgtaaagcggttacgccttccacccgaattgtctcagttccggcgccaaaaacgttcgcacccatcttgtttaagacattagcaagatccacaatttcaggttcacgagcaacgttttcaatcaccgttgtcccttcagccattgtcgcagccatcatgatgttttgtgtcgcaccaacactaggaaaatctaagtaaatattagttcccactaggcgttctgctttagcttcaatgtaaccatgattttgatgaatggttgcaccaagtgcttcaaaacccttcaaatgtaaatcaacaggccgcgaaccgatagcacaaccacctggcatcgcaactcgtgcgtgacctaagcgcgctaataacggccccatcacaacgatggaagcacgcatttttgaaacatattcaaaagctgcttcaaaattcaaatcaccactggcatcgattgttaattggttccgttgttcatcaaactcaactttagcatctaaactctttaatacatcttgcatcatgaagacatcagataaaataggaacgttcgttaattgaacgggtccgtcggttgctagtaaggcagccgccataattggtaatactgcgtttttggcgccttcgatttgaacttcgccaactaatcgttgaccgccttgtataatcaatttttccaagagtttccctccgaataagactgctagtttatgggactaaaaaaatcacatttttagcctgcgcgattatttctaaaaagaattggctaacggtgtagcccatcacaatagcgagaaatactatgacaatctgtacttgacggatatgattcggtttgaaaaattgctcaaaccggattgattgtaagccataaaaactgattaaaataaaaccaatatggctaataattgaaataactgcctgtaacccgattgattgcacttaaataacgccccttttgtgatatgcaaacattgtaacataccaaaataggatttgtctgcccaccagactgaatcttaagaaacaaaaaaagccttaaaccattcaggtttaaggctttttgaatcctacaataagtgattcttaacgttaatccggtttatcgcacgttgcagtgcaatttgagcccggcgtaattcgtcagtatcattatgttcggacgctgttttaattgcgttttgagcacgttccttggcactttgcgcacgcctaatatcaatatcacgcgcccgttcagcactatcggcaacgattgaagcaacgttatggctcacttccatgaacccaccattgaccgcaattgcgtcttcacgtgctggatcatcagtccgtttaacgcgaatctcaccaatttctaaaggggtaataattggctcatgattagccataataccaagttgcccggccatcgctggtacaaccaacaatgttgcgtggtgatcatagacaatcccacttggggtcacgatattaacggttaataccttttgttcttctgccatcattaacgcccctttctaagcttgtttcgttttttgttcggatggtgtataacccaattctttagcttttgctaatgcagcatcaatattcccgacaagccggaatgcttcttcagggacatcatcatagtcacccgctaagatgcctttgaagcctgccactgtatcttttactggcacgtatgagccggcttggcctgtgaaggcttcggcaacgtggaagttttgtgataagaagaattgaatccgacgagcacgcgcaacgataatcttttcatcatcagataattcatccatccctaagatcgagatgatatcttgtaattcacgataccgttgtaagacgtgttgcacttctgaagcaacttcgtaatgttcttcgccaacaatttctggatccaaagcactagaagttgattctagtgggttaacagcaggataaatcccctgttgtgttaatttacgatccaagttagttgtagcatccaaatgcgcgaaagttgttgcaggcgcaggatcagtataatcatcagcaggcacataaatggcttggattgatgtaactgaaccttttttagtagacgtgattcgttcttgcaattggcccatttctgttgccaatgttggttggtaaccaacggcagaaggcatccgtcctaataaggcagaaacttctgaaccagcttgagtgaatcggaaaatgttatcgatgaacaataacacatcttggccttcaacatcacgaaagtattcagcaattgttaaaccagtcaaggcaactcgcatacgagcgccaggtgattcattcatttgaccgaaaaccatcgctgtcttttccaaaacgcctgattctttcatttcaaagtataagtcattaccttcacgtgttcgttcaccaacaccagtaaagacagaaataccaccatgttcttcagcgatattatggattaattcttggattaaaacggttttaccaacaccggcaccaccaaacaaaccaattttcccacctcgtaaataaggggcaagtaaatcgataaccttaatccctgtttcaagaatttctgaacttgtatttaattcctcaaatttaggtgcagaacggtggatactgtcccgtctaaaatctgcaggaaattcttcgccgccatcgattgtttcaccaagaacgttaaatacccgtcctaaagtttctttaccaactggtacgttaattgcacgaccagtgtcttcaacagccatcccccgacgtaaaccgtcagttgattccattgaaatagtacgcattaccccatcacctaattcaagtgccacttctaagacgacagattcgtcgttccctttgttgacaaccaaggcattattgatatctggtaaagtcgtatctaaagaaaattcgacatcgacaacgggaccaataacttggacaacttttcccatactcatagttgttattttcctcccgcgtttcttattctaatgctgccgcaccaccgacaatttcggtgatttctgtagtaatctgtgcttgacgtgcccggttaaatttaattgataaatcagaaattaaattattagcattatcagtggcactcttcatcgccgtcatggaagcagaatgttcagctgttttagaatcaagtagtgcgccgtaaatcaaactttcagcgtattgcggtagaatggcatctaaggcatcatcaacagaaggttctgtgatgtattcttgatctttatcagtgacttctgaaacatccaagtcggtaataggtagcattttttcagctcgaaaagcagatgtcagtgagttgacatggtggttgtaacaaacgtacaactcgtcaaacacgccgctatcatacattgcaacagctgttttgatgatttcacggacttcattaaatgatggcacatcacttacaccacgatattcgtaggataagttcatttgtcgtgctttaaagaaatcagcaccagtgccaccaacggctaaaatagcatattcatcggcagacttgtggttttctgaaatcatttcaaccattgcttttaagattgagctgttataagcgccaaccaatccacgatcactcgtgatgaccaaataaccggtctttttgattggtctttccactaacaaattacttaacgtaatgtcatgccgcaatgatttctgtgaagtaccgttagtagcttctgctgctttagcggtacttttttgacgtgcacttgcaattaattgacttgcagccaaatgcgtgacgatttctcgaatcttattcgtatattgttgataagcgattgaatttttttcaatctgagaaagttttgcaccagagaccatttgcatagcactcgtaatttgcccagtttttttagtagaggcgattcttcgtttgatatccattaaagattcagccaattaattcaccccttactgtcctgagtcttgattgtcagcagtagcttcagcgccgacaaaaccttctgtgaaggatttgatagcagcatctaacttatctgtatctggcaatgcagcggtttgacggatagtgtccatcaagtcctttgcgttactttcaagataatcgctcaattgactttcatattgcatgatatcgtcaactggaacgtcatcaataaagccgtgtgttaatgcataaagaatcgttgtttgttgttcgaatggtaatggtttgtgaagtggttgtttcaaaacttcaacagtccgtttaccacgatttaatttcgcttgtgttgccgcatccaagtctgaaccgaattgcgtaaaggcttcaagttcacggtatgatgaaagatcaagacgtaatgtcccagaaaccttcttcatcgccttcgtttgcgctgcgcccccaacacgagaaacagatgacccagcatcaatcgctggacgtgttcctgaatagaataaatcactttccaagaagatctgaccatcagtgatggaaataacgttagttgggatataagctgagatgtccccagcttgtgtttcgatgattggtaaagcagtcattgaaccgccacctaattcatcacttaacttagcagcccgttccaataaacgtgaatgtaagtagaagatatcaccagggtaagcttcacggcctggaggtcttctcaaaagtaatgaaatttcacgataagcagcagcttgtttacttaaatcatcatagacgattaagacgtgcttgccgttatacatgaattcttcacccatcgctgcaccagcatatggtgcaatgtagagtaatggtgctggttgactaggaccagcttcgacaacgatggtataatccatagcgccgtaacgacgtaaggtttccacttgcgctctaacggtcgattctttttgaccgatcgcaacgtagatacaaatcatgtcttgatctttttgattaataatcgtatcaatcgcaacagatgttttaccagtcttacgatccccgataattaattcacgttgaccacgaccgattggtaccaaagcatcaatggctttcaaacctgtttgtaaaggttctgaaacagattgacgtgccataacgccaggggccttcttttcgattggacgagttttgtccgttttaatttcgcctttgccgtccacgggttgacccaatggattaacaacacgaccaattaaagcatcgccaacaggcacttccataatccggcctgttcgtttaacttggtcaccttcacgaatgttttcatattcacctaagatgataatcccaacatcgttggtttccaagttttgcgcaaccccgtatgaaccgttagaaaattctagcaattcacttgaaagggcgttttctaaaccgtgagcacgtgcaatcccatcaccaacataagtgacagtaccgacttcttcaacggctaaatcttcattataatttgcaagttgttgtttaattaatgcactgatttcctcagttttgatgctcatcaggttcacctctttatcaacgattgactatttcaatagtaatgacttaatttgatctaagccatgtttaacactgccatcgatcaccttgtgattcgattccagtacaatcccaccaataatatctggatcaacgatactttccactaagacctgattgagaccttcgcgtttagcgtagctttggctaatctttgcgatttgatcaccatctaaagcaacggctgacgttaccttagcgtgtgcaatccccatcttttgatcataaagatcttcgtaggccgcaataatgtatggcatctcagccattctttgatagtcaaaaacaaggcttaaaaagtgttgcatgagtgtactaaattcaccggaaaggctctttagaagctcacgttgtttcaatccagataaagtcgtatcagtcagaactgcacccaatcttgggttgtcattgaaaatagtctcgagtgcttgtatctcttcatggatactttcaaattgttgctcttgttctgcaagggaaaataatgcctttgcatagcgttgtccgactgcatatttatctagtttcattttgcttgtccaacccttcaatataggaattgatcaatgacttttgatcagtaactgacaattctttcttaatgagtttagaagcaatttcaatagatagttgagcaacatcatctctcgcactgtttaacgcatctaaacgagattgttcgatgtcttttttagcattttgttttaaagtttggacttcttcttgagcaagtgtgaccatgccttcgcgttgtttttcaccatttcgcttggctgtattcacaatttcaactgcttctgacttagaattcttcaactctgttgcgcgttgtgctgctaatttggcagcatcttcacgtgattgagcggcgttatctaagtcgtttgtaattttgtcagaacgagcttgcatcatttttgaaacaggtccgaacgcaaatttaccaactaaagcgactaaaataataaagacaactaatacgaaaagtgaatctccaaggtaggcttcagaagcaccaacgattaaattactaaacatctattgacactccttccttgacttactgactaatttttaaagcgaaaatttagattcactcggattaactaaataagatcaagaaagaaacgacgatagaaagaattggaacagcttcaatcaacccaacaccgataaacattgttgagcgtaattctgctgataattctggttggcgtgccatactttcgattgtttttgagataaccttaccgttaccatatgatgctgcgaatgctgctaaaccagctgcgatagctgctgctaaatagttcatgttttttcctcctaatttttagtcttccatttcaactttttctgaaatatagactatcgataatgttacaaatacatatgcttggattgccccgataaagacggagaatccttgccaaaccatttggatcggtgccgtcacaagcatcgttgctggtccatgtgagaaggccattttaactaataaacttagtaaaacttcacccgcaaaaatgttcccgtacaaacgcaaggacaacgttaagaaattggtaaattgttcgatgatattaattggtaagaaaaatcctaccggtttaatataactcttcatgtaattaccaaaccctaaccgttcaacactaaagtagtgcgcaatcactaagacgatcatcgcaagcgacatagtgataatcggattggccgttggactcttcaaccaagttacatcatgtaccttaatttgaagaatcaaaccaagttgattactgataaatacgaacatgaacatgacgaatgcaaataagtaaaattgtttaccttcttcaccgggcatcgcacttttaacgattccgttcgtaaaatcaatgatccactccaaaatattctgccgtttagtcggtttaagcgcaatttttcttgataaaaagaaaacgagtgcaaaaaccaaaactgcacttactaagaccgatagacagtttgctaaattaaaacgaattcccaaaatgctaataatgggatatttatcatccacaaaattccctcctcccttaggcttatttgttgattccactctatcaacgactacgtctacgcgagttgcacaacgaacctaaaaacagcaatatttatgtagaaaaattaagcataaatcatcaccgcaatacaagtatgataataccaccattaaattaaaagtacaaagcaaatactaactaatttctaattatttttttgtcaatgcactcaaataccataaatattatcatatcaaaagattaaacttattaacggttgcttttttggcaaaaaaaacgcgtaacacaggaaaatcaagtgttgcgcgcttttattatcggtacctaattaatggctatttagtcccgaaaagacggtcgcctgcatcccctaaaccaggaacaatgtatccatcctcgtttaaatgatcatcaagaccagctgcatagatgtcaacatctggatgggcttcttgaacagctttaacgccttcaggtgcagccactagtacaacaaggcgcattgacgttgcgccgcgttttttaagggcatcgatggccatgattgctgagccaccagttgcaagcattggatcaacgatgaatagttgtcgttgatcgatatctgttggtaatttaacaaagtattcgtggggttgtaatgttttttcgtcacggtacataccaatgtgaccaactttagcggctgggattaattctaaaacgccatcaaccatcccaagacctgcacgcagaattggcacaacggctaattttttaccgctcaattgtttttcaattgcaggccccattggtgtttcaacttctacgtcttccattgctaaatcgcgcgtgatttcataaaccattaattctgcgatttcgtttgcgacttcgcggaaaactttagtacccgtatccttattccggataatcgttaatttgtgttgaattaacggatgatttaatactgtgaattttgccatttactttgcccctattctattcaatgaatttagtccaaatttttttcgcaaaaaaagagtgactccaaagaaaaccttctccgagtcactctcccttccgcgtaaaattctgtttactattgtagcgtaaatagcatcaaaaaactagcggtattcattaattaatctaaaaatttagcttgtgtgattggaaaatgatccgtcaacgctaaaacatctgcactaatgcgcgtcatggcgtctaattgatcgtgtttttcaatcacttctaaaattaattgcgcaatcaattcacaatccgcttctttaaacccgcgcgatgtgattgctggggtcccaattcgaatcccacttgccttaaatggacttaatttttcaaaaggaatggtattcttattaacggtaatgtggacactatctaaaaatgcttggacttccttcccatttaagccactctgcgttaaatcgagtaacattaaatgattgtcagtcccgcctgaaaccacacgtactaagtcagattgttcgaaaacgccagccatcgcttgcgcattggccacaatttgttttgtatatgctgtaaattcaggttgtaaatcttcaccaaatgcaacagctttcgccgcaatgacatgttcgagcggtccaccttgaataccagggaagatggcagagtcaattgctttggcatattctgctttacacaaaatcattccaccacgaggtccacgcaacgttttatgcgttgttgtggtcaccacatcggcatatggcactggacttggatgaacaccagttgccactaaaccagcaatgtgtgccatatcgaccattaaataggcaccgacatgatcggcaatggcgcgtaatcttgggaagtcaattgtccgactgtatgctgatgcccctgcaacaatcattttaggatgaatttcatccgctttagcagcgagcgcatcataatcgattcgttcgttatcgtcagcaacgccataactatagaagtgataaagttgcccactgaagttaaacggtgacccatgggttaaatgaccgccatctgtgaggttcatccctaaaatcttatcaccgggttctaaaagcgcttggtaaactgccatattagcctgcgaaccggagtgcggttgtacattggcatgttctgcattaaaaagttgtttagcacgttcaatcgcgagtgattcaatttgatcgataaattcacaaccaccgtaaaaccgtttgcccggataaccctcggcatatttattggttaatacgctaccttgtgcttcttgaacagctccggaaacaatgttttcagaagcaattagttcaatattatgcacctggcgttgttcctcttttttaatcaattcgtaaatttctggatcagtttgttcaatcatttacaatcactcctcttcctattaaaatagtgcctatttcgaagtaaagtattgttggccggcagacttctcgaggcgattcatatacgctaatccgacaccctcttttgcgaagccttgcactaatataattttaacctcaggattcaaatcaaaataccgtaatccttcaaacaagtgttgactagcagtcactacagaatcacctaaagagaactgatctttaaacctaacgtcagataactgccctaacaccgtatcaaccgccataacaccaaatggcacactttgttgactggcccatttaaccgccgccggaaattcatctggcgttggcactatgtaaacctgtgcatttggagcatagtgtttgtatttcatgcctggtgcctttggcgtttcagctgcgccaactttatggtggtttgtcataatcggcccaatcacacgttcaatggcttcttgagtcacaacaccgggtcgtaaaataacgggtgtcgcaacacttaaatcaatcaccgttgattccaacccaacaccagttggaccatcatcaatgacaccggcaatctttccatttagatcatgtaaaacgtgatcggcagtggttggactgggcttgcctgatgtattggctgaaggccccacaagtgggacaccggccgccttaatcaagtctaacgtcaccgcattgttcggcattctaaaggcagcggtctttaaaccacccgtcacaactgaatctagtgccgcatgttttagcggcaaaataattgtcaatgaaccgggccaaaaagcgtcgactaattgcttaaatcgatcactaactccggctgcgtaatgctcaaccgtcgcaacacttgctacatgcacgattagcggattatcacttgggcgccccttagcggcataaactttcttaaccgcttcaggattcgtcgcatctgccccaagaccatagacggtctcagttggaaatgaaatcaattcgcccgcttttaaatctgctgctgcttgttcaatctgttctactgtgtatctcttggtttccattataggccttccttactctacttctgatttacatcataccaaattccgattgaaatcgtaacccacacgggccattctagaccaattagccatatcttttttgattgtaaccgctacatcggtcgattcatgttcgaataaccgaacgatcgcctctttttgctgataaccgaactctaaataaagctgcccatctggttttaaatacgcacgcacttctttagcaaaccgttcataaaacgctaagccgttattatctgcaaatagggccaagtcgggttcgtatttcaaaacggacgcatccatcacatgccgttcatcttgtgcaatatatggcggattagacacaatcacatcaaactgttggcccatcactggggttagaaaatcacccacgataaagttaacatgcgcgtttaattggcgcgcatttgcttgtgcaacagcaatcgcttctagtgaaatatcaattgcggtcacttcccattctggatgctcacaggcaagggtaattgcaatggcgcccgttcctgtcccaacatccaacactttaagtggtcggttctttggttgtgtagcatctaatatccattctaccaattcttccgtctcaagtcgtggaataagcgttgccggcgtcaccttaaaatcgcgtccgtaaaaattagcatatcccaaaatgtattgtgccggttgatcagcgataaacgcgtttaagtctgcttgatactgatcgtattcggcagtcggcatttcatcgtgataatgcaagaccagttgggtcgtcgtccaatgtttacgaccgagtagtaaaaagcgcgctgcttcacgttctttagcgtgttcttctaaaaataaaaaagcccaattcagggctttaagataagtgagctgtgccatcttgtaattgctccaatttttcggtttgatcgtaaagaattaacgcatcaatgacgtcgcctaattccccgttcataatccgatctaatttgtttaacgttaaaccaattcgatgatccgtcactcggttttgtggatagttatatgttctaatccgttcagaacgatccccagacccaaccgctgacttccggcttgaatcgtattcactttgattttgtgattcatagaaatcataaacccgtgactgtaagatttgcattgccttcactcggttttgttgttgtgaccgttgatcttgcatcgcaaccacaatcccggttggaatatgcgtcatccgcacggctgaagaggttttattgatatgttgaccaccagcacctgaggcacgataaacgtcagtccgaatatccttaggatcgagctgcacgtcaaccccatcatattcaggcataactgcaacagtcgctgttgaggtatgaacacgaccttgtgattcggtctttgggatccgttggacacggtgcgcaccattttcatattttaacttcgaataaacatttttaccggtaatcatcatcgcaacttctttgaagccacccacttctgtagccgtttcatcgatgatttcagtttgccagttttgtgattcagcgtagcgttgatacatattcaacaaatcacctgcaaagagactggcttcgtcgccaccagcagccccacgaatttccatgatgatattcttttcatcgttaggatccgttggtaacatcaaaatcttgatgtcttgttctaattgttccttttcatcttgtaactcacttaaatccgctttagctaattcttccatttctgggtcattagattcgcgtaacaattcttcgctttctgcaatgtcgtttaagacagtcttcaaacgcgtgtatttaccaacaatttcccgtaaacccgcttcttctttagacaattccatataccgactggtttcgttgatcacttctggatcagacattaattcctgtaattccgcatagcggtctaacaaactatcaagttgttcaaacattttatccatgaatgactagccttccttttcactctcttgtgttaccggtgggttaaaatagtgtttccgacaaacggggtagtatgcttcgttgcccccgatttgaatctgttcacccgtataaaccggtttgccatcgttcattcgcaagttcataatcgcttttttgcgacagaaccaacagatggtcttcatttcttcaatcttattggcaaatagcaataagtatttcgagccttcgaataattcattcttaaaatcattcttcaacccaaacgccatcactgggatattcaaatcatcaacgacctgcgccgcttcgattacgtgatgccgttctaaaaattgtgattcatcaatcaagacacacgctgcatccggattagtcgattgtaccaactcaaagatattcgtatccgagaaaatcggtgtcgcctcacgtttgagcccaatccgacttgaaacaatccccaccccgtcgcgattatcaatcccactcgtcaggatgatcactgatttattctgctcttcataattgtgtgcgacttttaaaatttcaatcgacttaccactattcattgcaccatatctaaaaaataattgcgccactctcaaacacccctatgttaagcacattttaatctagtatacctgaaaatcagcgaggcaacaatattcgccactattaaattctaaagtttcccttattttatttgcagatgcgtttttatatcgtccaaattgagaatttatgctatgattatgaacattgaaagggtggcaagcatgacaattaaaagctcatttgcaattacagcaggacgtttttcatattggtatttacatacctttatgaaaggtggcagctccctccccgggaaaatcgcaaccaagttcgatcctgctgtgttaaagcagttaaccaagaactacgacgtgattatcattaccggtaccaatggtaaaacattaacgaccgcactcactgtgcagacgttgaagcaaaaatacgatcatatcatgaccaattcgagtggctcgaacatgatgcaagggttgaccaccgcctttttagcagatcatcctcaaaaaggacaacggcaattggccgtcctcgaagtcgatgaagccaatgtggaacccctttgtcactacatcaagcccaaagcgattgtgatgacgaatattttccgtgatcagatggatcgtttcggcgaaatctacacgacttataatatgattctagcgggcgtcaaactcgttcctgaggcaaccctcattatgaacgctgacttgcctctcttttcatcggttgaacttcctaatccaaagatttattacggattcaaccacttaccagatggcgaaatgatggctccaagcaacacagacggcgttttgtgccccgtttgtgatcacatcattcattacaaattcatcagttatgccagccaagggaagttttactgccctaattgtggctaccaacgacctgaattagacgaagcagtcactgccatcaatcagatgcaccccacaaattcacactttgaaattaacaacgaaccgtttgaaatttcaattggcggcatgtacaacatctataatgcacttgcagcctatagtgtcggtcgattctttgatattccagtgaaagcaattcaaaaggccttcactgaagacaaacgaatctttggccgtcaagaagtcattcaattaaaagacaaagcggtcacattggtactcgttaaaaatccggttggcttaaaccaagtcttacaaatgatcagttctgatccagaagacttttcactcgcaatgttgcttaatgctaactatgccgatggaattgatacgagttggatttgggatggcgagtttgaagacttactcaaacacaacattccaaccgtgattaccggtggcgaacgcggtgacgatatcgctttccggctaaaagtagccggtgtcacggcagatcaattacacgaaactaaagaactcgatgcaacgatggcagccattgaagcagccccaaccaaacatgtttatgtattagcaacttataccgctgttttacaactacgtaagaagctggcagctgccaattatattaagaaaggactatcagtatgacccagacattaagaatttgtcatctatacggcaatttaatgaacacatatggtgatcttggtaatattttagtccttgattactatgccaaaaaagttggcattcaaactgaaacagaagtcattagtatcggtcaagatttcgatgcaagtcgttacgatatcgttctcttcggcggtggccaagacttcgaacaaaaaatcatctcagaagacctcaacgacaaaaaagcagccctcaccgaatacattgaaaacggtggtgttatgcttgccatctgtggtggttatcaattattaggtcactactatattggcgcaaacggcgacaagattcctggaatcggcgcacttgatcattacacattgagccaagataacaatcgttttatcggtgatattgtcatcgaaaaccgtgagtttaacgaaacctacctcggttttgaaaatcacaacggccggactttcttgggcaaggatgaaaaaccacttggttacatcaaacgtggtcacggcaacaatggtgatgacggcaccgaaggttgtgtttataaaaacacatttggttcatacttccatggtccaattctcacgcacaacggtgttttagccaaacgacttttatcgattgcggttagccggcgttttccagaatttgatttacaacaaatcgctgacttaccactcgaagaatcacgttaccaagtcgatgcagccggcgtcaaacgcgtccaaaattaacaaatcaaaaagtcgaccattatgcggtcgacttttttgatgtcttaatcatttcgcaagaaaaaatacactttttattcataaaatgataatcgtttcacaatacttgctcggtatactgactttaacctataaaaaggagcgaatcattatgttaaatcaaatgccagcagtcgagtccgttcaaattaatcggattgaaaatcatgataaagttttcgcaaccactgaaagtggtcaagaaatcgaattacatattaccgaccaacaaaaaaaggaccgcctcttctgggaatccctcatcaatatcctccgcgctgaattgtggttacccctgcaaaagagaacccacgaactactccaaaacgactggctaacggtcgatggctaacgtgtggctctgggttcggatgacttacagaacacgtttaaacgatcagaacacaactatccaaaagggcgctaacaaaaatattgttaccgcccttttgcatatcaatgtttcgttttttagcgttgccctgtccactccgctaaatactgatccacaaactggtgcatgaaatccgttcgcgcttgcgcgatttcgcgcgctgcctgtgtgttcatcgttgctgccaatttaaataatttctcataaaaatggttaatcacggtagacggttcgcgatagttttcctttgtcaattccgcccgtggttgaatctcaggatcataagcaaccccatcgtgtgcgccaccatacatgaaggtccgcccaatcccaatcgcgccgattgcatctaaccgatccgcatcttgaacgatttgcccttctaaacttagcgtttggtgttgattgagatttttcgaaaaggacatgtggtcgataatatcaaaaattgccgtttgttggccatcttgtatgccgttttcggttagtttagtttttaccttttgtcgagcctgttcaacatcagtcgcgattttttcatcaatcacatcatgcaataaggccgccaagataatcgttgttaggtccgtagctaactctttttgctgaattaaacaggcattattcacgacccgttgaatgtgatcgaatccatgaccgctgtgttctgctgccaattccgttcgtacaaattgttcaattgcttcgatttgtctttgcatacttgtcatcctactcttttaatcattaaaaaaaattgcaactacggctgcggttgcaattggttatattcagtttacttgttacccggttctgacgcaataatttgcatgtcaccttttaagtcccatgacttaatatcaaatggtaacacaaaatgcatattcttgtgaattgggtaagtttgcccatcggcaatcagttcgccttcaccatcgaccacggagactaaagtatagggtgccgttgtccgatcaaagtgtaagtcgcccttcactaaccattggtaaacactgaaaaatggtgacattggtggttgcacataagtcgtgattgttgaatctccaacatgttctgtttgaatattcaaaacgggatcttgatgcggcacaatcgtcgtatcaattgattgcttcaagtgtagttcgcgtttttcgcccgtcttagcatcaacccgatcataatcgtataaccgatatgttatatcactactttgttgggtttcaagcgccataatccctttgttcaatgcgtgaatcgtgccacttgggacgtagaaaaagtcaccagtcttaacgggcactttgcggagtaaatcatcccacttgcctgcttcaatcattgctgttaattccgctttggtcttggcatggtggccatagattaaataagcacctggttcagcatccaaaatataccaacattccgtcttaccgagttcggttggaccttcatgagcagcagcataagcgtcatctgggtgcacttggacagaaagacttgcttcagcatccaaaatcttagttaacaatgggaatactttaccttctgcattaccgaaatattcgcggtgggttgcccatgcttgatctaatgtgagcccttttaatgggccattttcgatggtactaggaccatggggatgggctgaaatggcccaacattcaccaatatcgccgtctggtaaatcataatcgaaggcttcagctaatttgcgaccaccccaaatttttttttgaaaaacaggttttagaaataaaggttctgtcaattcactcactcctaatgcgctttatttatcaatagtcccattttaccacaaatgtaagcggataatacgcaaatttgcgaatttgactaggcttttgtttctaggtgattatccgctaaaaattgtgccacaatcgcatcccgttgttccaaaaagaccggattatcagccgttggatgaatgcgattactcaggacaatcagccccgtttgccgcttgcgatccaatagcatgaacgtgccggtaaaaccggtgtgataaatcagtggctggtgttcttgcggctcaaagcgcaaatcccagcccagtgagcgcccgagatgttttggtgtccaatcacgatagagactcttaacactcgcctgactgattggtggctggtcaaccttcaactgccctaattggaactgggcaaagcggacaacgtcttttaatggagcaaacaagccggctgcaccactatgattttgtaaaatcgcacttttcggatcgtggacagtgccctggattaagccgcgttcggcactcaattcagtcgggaccgccaaacttctgtccggattaaacgtactggcttgcataccgagtggggttaaaacgagttcttgaatcaaatcctgaatcggtttttgatagatggcttcaatcatccagcccaaatacaacatatcaatgtccgtgtaaacaaccttttcaccaaaatttgggccgaccgttaattgcgtcaaaagcgccgtttctaattcggcagccgataattgattccgattcggaatgtagcccgttaaaccggacgtgtgcgtcaatagatgcaagaccgtcacccgtcgatctttaaaggccggcaacaaactatgcacttttgttcgtaaagaaagccgccctttttccaatagccgcaaaacaatcgtcgtcgtgccaatcactttcgttaatgacgctaaatcatacaactgatcagcttttaacggcactttttggggcactaattcggcctgcccgattacattagtcatcacttcagggccttcgatgatggcataagaaacaccagggacaatcccttcatcaactagcgctccaatttgccggatggtttgttcaaatcgcatgttaaattcctcctactacatcagtatcactagtatacaccaaacacggacaaaaataaggccgcagattttatctgcggccttatttgcgtcattcatgattaaattttaacgttgcctgagaattgactattgtacaagtcagcgtagaaaccatcttgtgccatcaaactatcatgggtcccggtttcaataatcgaaccgtgattcatcacgatgatgttatcggcatcgcgaatcgtcgataaacgatgggcaaccacgaaactggtccgattttgcaacaagcgttccatggcgtgttgaatatgaatttcagtccgtgtatccactgaactggttgcttcatccaagatcaaaatctctggatcggcaacaaaggcccgcgcaatcgtcaataattggcgttgaccttgggagatattcgaagcttcttcattcaagaccgtctcatagccatcaggtaattgacggacaaaaccgtcaacgtgcgctgctttggcggctgctaaaatggcttcatctgaagcatcagcgttcccatatttcaaattatcccaaatcgttccagtaaataaccaagtatcttgtaaaaccatcgcgaagtgacgccgtaattgttcccgagtcatatcgcgcgtatcgacacctttaagcttgattgaaccgccactcacgtcgtagaagcgttccaacaagttaatgatggttgttttaccagcacctgttgggccgacaatcgcaatcatttggcctggtttgacttgcaagttgtaatccttcatcaagatatctttaccttgataaccgaattcgacatgttctaattcaagtagattttggtcatcaacaatcgccgacacttctgatgggtcgtcactcatgttatcttcatctaagacttcgaagacccgttcagctgaggcaatcgttgattggattgtattcgctaagttggccaattgcgtgattggttgtgagaattgttgcgtatattgcatgaacgcttgcatatcccctaaagtaacttggccgtgagaaacacgaatccccccgacaattgctacgaagacgtaaccaatgttattgacgaacgtcattaacggcatgatgaccccagaaataaattgtgccttccaagctgctttatagagtaatgcattttgttcttcaaaggcatcaattgtgacttgttcgcggttgaaggtctttaagaccacttgaccagagaaattttcttcaatttggttgttcaacaaccccaaacttttttgttgcgctgcgaagaatttctgtgatttcggtgcgacaatcccgacgacgactaaactgagtggaatcgtgactaaggcaattaaagtcaattgccaactaatcgagagcatcatccacataacgccaataaatgtcacagcactggttaccatttgcgttaaactttgttgcaaggtacttgcaatgttatccatatcattaatcgcacgactcatgatatcgccgtttgagtgtgtgtcgtagtaattaatcggtacccgttgcatcttgtcttttaattctttccgtaattcatagacggtttgttgggaaatccgcgtcatgatgaattgttgtaagaaactgaaaaccgctgatgctaagtacatcaaaatcaccgtcataataatgtgttgaatcttatcgaaatcaattggtaagccattcatcggcatgcccgctttttgcatggcattgcccttcataacacccttgaagatttcggtcgttgcttgtcctaatacttttggtgttctaatttggaaaataacggagatgattgctaaggctaacacaatcactaatccgattaaccggctagacatgtaggttaataatcgtttggttgtaccccaaaaattcttcggtttttcaacgacaccacccatgccacggcctgggccatgtccaccttggggtcgattggttgttgttttttcagccattagtcttcatccccctctctgatttgtgagttaataatttcttgatatgtggcgttattagccttcaattcagcatgtgagcctttaccgaccagctggccttcatccaagaccaagatggtgtcggcatcggcaacggttgatacccgttgaccaacaatcacaacgacactcttttgaatttcagcatcttcttttaaggctttccgtaataaggcatccgtcttaaagtccaacgctgagaaagaatcatcaaagacataaacagccgcttttttaaccaacgcccgtgcgatggcaagccgttgacgttgaccaccagagaagttgcccccaccttgttcaacgtgactatctaagccaccttcaagttcgctgacgaaatctttagattgtgcaatttcaagtgcgtgccagatttcatcatcggtcgcattcggattcccatattgcatattttcccgaatcgtcccggtaaataagttcgctttttgagggacaaatgcaacttgttggtgaatgtcatggagggtcacatctttcacgtttaaccctttgactgtcacttcacccgtttcaacatcgtaaaaacgaggaatcaagttgactaacgtggtcttccctgagccagtgcccccaatcacggcgactgtttggcgcgctgtcatttggaaatcaacgttttcaagcgctaagtgttccgcattttgataacggaagttgacctggttgaaagccaagcttgctggttgatcaccaaacgttttaggcgtcgctggatcttcaatcggcgtgtgtaaatcaagcacttcattaatccgcactgctgaagcttgcgcccgcgggataaagacgaagaccattgaaagcatcatgaaactcatgaggatttgcatcgcataagtcatgaacgctaataaattcccgacttgcattgcttgattggcgattaagtgtccacccatccaagtaatcgcaatgttagtcccactcatgattaacgtcatggctgggaacatcactgacataatactataaactttcttcgcattttgcgtgtagtcagtattagcttcatcaaaacgttcttgttcgaacttgtcgcgccggaatgctcgaatgacccgaaccccggttaaaccttcccggaaaactaagttaatccggtctgtctttttctgcattgccttgaataatggcacagcgaagtacatcaccccaccaatgaagagtgccatgattggtaagacaaccaagaaaatggatgtaagttgcgcatctttttgatacgctaagaaacttgcgccaatcaacatgataggtgccataatcatcatccgtaagaacatcattgccacattttgaatctgcaccacatcgttagtcgtccgcgtaattagtgaagacgtcccaacttgatccatttcatcgtgtgagaagttgatgaccttccggtagatatctgaacgtaatttttggcctaagccttgtgacgtccgtgccgcaagataaacgttgcagacggctgcaataatactaattaatgaaaaacctaacattttaaagcctgcttgccagatataatcaatattccccttagcaatcccgtcattgacaatgtcggaggttaaattgggtaaataaaggttactgacaacctgaatcgtcatgaataaaaccgcaccaaagacggcccaacctgacattcttttctttgcaagtttaagcatgttgtgtgtcccttctttccttatccttgtttgctggcccctgtttctaaccagcctaatactaattcgaagcgttcttggacctgttcaattgtaatcgcatggtcactttcttgttgcagataatacgctgcaatactttgaaagaccgtcgtcatcaactcatgaaataaaattctaagcgcttcgggttgatctgcgttaatcttgagcaagtcgtaattgacgttttcttctaaaaagcgcatcccatctacttgtttggcatgcattaattctggtgacatcttgcgctggttcttataatccatatgtaagaagaggtgcttgtaaaatggtgcattttcaccattaataatctcttctgccatttcagcaaagaattggcgaattgccttgaatagatcaccatgaacagccaacagactcttttctaaatcctgctttgaactgtcgcgtaataagctaaggtcgtagaaaaaaatatccgccttatcttcaaagtactgataaaaactgcctcgcggaatctccgccgttttaataatgttgctgacagatgcttcattaaacggtacccgtgaaaactcagcatgcgcagcttgaatcagtcgttgttgcttttcctcaggtaatctaaaaaatgttttcttcggcatttcgatactcctttctgaaaattaatgacagagcgtcataattgtgacgtaatgtcataatacgccaacttaggcactcatgcaagcattaaatccacaaaaaaagaaccggcagactatcgtctgccggttccctttaaaaggcgctatttatcgtctttgtccattttttctttaatatcatccatcacgtcgttggctttttcagcaactttgtctttggcatccgctaatttttctttagcttcacccataaagccctttgctttacctttggcctcagtttcgcgatcaccagtcaccttaccggctgtttcttgtactttaccggttacttggtctttcatgccatctaacttttctttatctgtcattcaaaatcactccttcttattggtctacctatatgataggatagctaaccaacattagtcaaaatttatgattatgagtcgcattatgtcagtttaccatcgcgcatcacgtattgatgatctgtataatccaagacgcgttcatcatgggaaaccatcacaatcgtctgtcctgtctctttcgtgattttagccagctgctcagcaacctgtaaggcccgtttactatctaaactagcggttggttcatccgcaaaaatcaaatctggctgaccatacaatgcccgagcaatcgcaactcgttgacgctgaccaccagataagctcgttgggtactgacgtcgttgatcccaaacacctaaattggttaatagttgttcagctgattgtggcgcttgcttttcacgtaatcgatcgactagttcgaattgttcttcaaccgttaaaaatggaaccagattcgaactttgtaatataaagccgaaatcgttaaaccgtaatgcagaccgctgtttttcgcttaattgactaatctcttgatctttaaaaaagagcttcccactcgttgggccttgtaaactacccataatcgttaataaggtcgtcttcccagaaccagatggtccggttaaaccaatgaactggcccttttcaatcgttaaatcgatttgatctaaagccgtggtttgctggtcgcctgcgccaaattttttgacgattttttctaaacgcattaaagccatcctatgcccctccaatcgcatcaagcggatcaatctttagaatccgccaaattgagaataaagcgccaatgactgtcatcacaagtaaaacagcagaaaaggccccaattagtaaaggattatttgtatacggcaccgccgctggtaataccaatgttgtcaatgcgttacacaacaaaccaaggccaatcccaatcacccctaagaatacagattgccacattaaactaccaactaattggccacctgaaatcccttgtgctcgcataaccccgtatacggccgttttttcaatagtaataatatacatgaaaatcccaacgataaaggcgacgatgactagcaatgcgccaatcatcaaaccaaacgtcttaacctgtggcccataccccggaatcttatcgattaattctggaattgtcagtttggtcagctgatccgttgtcttaatccgcgcgtttccctttaatactaaagcattaatgcgcgtaatctgatcagtgccgtagcgcattcggctaaaatcggtcaaccgcaaataagtcaccggttgcgtattatagcggtggttcgtcgtaatcccaacaattttgtacttttgttgacgcccattcaatttaatttgttgatttaaagcaattccttgtaagccgtcgtcgaccacaatctcatttgcctttttaggataccgtcctttttgcaacttaggcttcaaaaaagcatcaaaatcgataccaaaaacactcgtattttgcttacttaaacctgaactactcacaacacccatcatctgagcaagttgcgcatgatttttctgtgcacctttaatagagggtaattgatcaacatctaattcagaagcagccaagtttttattcgcatactgactaataacaacttctttggcgtgccattgatcaattgccgaacggttattattggctagcccatatgccaaccccgttaaaaaatagattaaatatgcaattagaaaaatcgtaaaaatgatcaacgaataacgtaatttagcatgtttaatttctttaattgctaaatacatccaaacacccctttcttaactgttttaatctaacataaagcatcgtgccttgaacagcaatccgcattcaatcttttattcattcacgggaatatgctatgataagcacacggaggtggtgcttatcaaacacgtcaaacatgggattgtctttttgcttctgattatcatccaacaagttcctttaatgattgtcagtggcttatcattgctccctaaggcccaacagacaacccatctaattttagtctttggttggctttttctaatcacgactatcggcattactgccctaatgtggtattactaccaaaaaattaaatcaacgcgttatgaccaacccttcaccaaacagacttggtggacaatgttgattggctttatcgcgatggttgctgtcaataacggtacaatcccgtttatgcatactaccggtaatgccaatgttgatgcactaacctcagtctttcagacgattggtattttcatgctaccatacgccctattcttaggtccgattatggaggaattacttttcagagggttcctaatgaattggtttttcccaggcacaccaatcatctcaatcgggttaagtgctatcttattcggattgatgcacggcgcaactgatccgatttatttcatttcaaaagcactgcttggcctaattctggctatcgtctactatcgcacccataatattaagagtaatattgccttacacatgttgaataacattactgctggctttacgattttttaaacgactagaaaggaagcatgactatgtctgcattaacaaccatcttaacttacatccaagaacatcctgatgaagtggttctagaaccgtttcaatatgcgaacgtgattcgctttggcattagtgaccaagtcgatctgccagatgccgagaaactgttccctgatatgcggctacacgttaaccggattgaccccgagtacgtcaaagaacaccatgacttattgacgactttttatcaacaaaccgaagaaaaacaaaaagacggcttccaagatgtgtggattactaccgcccatcttagtgaccgtcaactttatttagtggatctttcttttgaataagcctcattttgaacagctaaaggtcagctgtattaagtatgctattttaaccttgtttctctttgtcatgcgtgcctttattgcgcatcccatcattatgattgccagttggattagcactgctgtttgcggcgcatatttcattgccatgttaattgtttattattacggctaacgttgcatatgtttggtctcagcaatcacttcttctgtaaaatacaattgaaaaccaaagaacaccgtcaacataatcgcagctatccatgcagtgcgcacattgattaacttaacaattaaccctgagctaatagtaccaatgaagaagctaccaacaattaacccgaagtaccgggctttttgttggtagtttttttctttggtcgctaaatatagataagtattttcgattaatttcttataattgccggtcgtaaaagcattcgcatatggatagccattaaccgttgaataactcgctaattgcatggccatcgacatcgacagaatcggtgtcacaaacatgttgggaatcgcggttgataaaaaaccaactactactaaagcaataatttgaaaacctaataaccacaaccgccaaacattcaacccaccagtgttaaaatgccgcttcgccagctgcacaataataaccccaaacccaaatgaaataatgggtaatatcttttcaggaagttgtgcccactggttcgttgcgatatctaagccgatgaacacgatattaccggtctgtgcactcgcaaagacgccaccacgtaaaatcacacaatacgcatctaagaagccaccaagaaacgttaaaaacatcgccgtgcttagccgatcatgaaaccctatttctttttgcaacccaatccctccaaatcaatactcttattatacgcaaattaaaattgaaatcaaaaaacggattgcactatttcacagtcgaaataaggtacaatccgctttacactataaattaattgaattgacatcttgaccatggaccacttttctaaagtcgaccagtcctaagtccaaaccgcgcagcaatacttcagccgtcccgacgttggttgccaacggtacttcataaacgtcagataatcgaattaatgcattcacatccggttcgtgaggttgagcagtcaatggatctctcaaaaagattaccaggtccatcttattttctgaaatcaacgcgccaatttgctgatcgccccctagaggacctgacttaaaccgtgtaatcggcaagccagttgcttcaataattttttgaccagtcgttccagtcgcaaataattcgtgttgcgccaaaataggtttataagccgtcgccagtttcacaatcgttggtttctgacgatcatgtgcaattaatgcaattttcatctgaatccctcctaatgtctgcggtgtttaaccaccgtaaaaaagtgtaacacacttgccaatagaatgaagaagattaaaacgaatgacacataattaagccaaaactggccaattggcaacactaagttcactaattgttgcagtaccatcgtaatcaaggttgcacaggcgaccatgccaaatagttgtatataccgtttcactgtatcatccgtcctctttgctttagattgaatgcttgcgccgacttggcgacattccgcttgtttctgcgctgaaagtgtctttaaaccatacgtttttgtctggacaacttcccggatttttaaaagtccagctgcccccaagactttatcaaaagttctaaaagtcccgtcagtcacaccagtaaccaattcctcagctggactggcataacaactactaatcgtaatgtaacttttgcctttgaagcgatctggtaacgcatctcccgcccgattaaatcggactaaccgttgccgcacgcaatccaagaagtttttcatcacacccgacattgcacccccaataagttggcgcagccagtatccaaacatcggctgccaataacttagcttccagttcatccaataccggattggctttgccagcatctggtaatatttgataatcatttaaaaagatcacttcaacgtcatcttccggttttacacctgctaaaacggcatctaaaagttgcccattgaccccatctcgttgatgactgcctaacactcctaaaatcttcatctgatcaagcctcactctttatactactttcagtttacacttccaatcactaacttaccataaaaaaacgcccagaccaatggcctagacgttgtcattattttagtttagtaccaaccattacttaaccagaagctcttagcggtatcccatgaaccataacgacttgttacatattgatctgcaacgcggtcttggttagctgctgaataatcaccatttaagtatgaagctgataattgataacggccgattaattgaccgttacgtgctgaatatgaaccgcctgattctttttgtgcaatccattccttagatgaactcgttgtagttgtagttgttgtttgtgcagctacgggtgcttgttgtactggtgcagcttgaactgcaggttgtgcttgaactacaggggccggtgtttgaacaggtgtagctacttgttgagttacaacaggggctggtgttgttgccacttgatcagcatcaattgttaattgttcaccaacaaagatcatattaatatcagcaatattattagttgttgcgatttggttaacaagctctgtactaccattgaatttttgcgcaatggttgaaagcgtatcaccatttgcaacggtataagttgttgcggcactggcttgtgattggttaacgaaaagtaacccggttgttgcgacggttgttaaagcggcactgtaaagtaaagtttttaaagatttcatattttgaatggactccttattgtttaaattgatttttctatctgtttaacgtgggactaatataccatcttaaatccgttagtaaatatcaaaaccataacaattgatgacaaatccgtaacaaaatgacggcaatttcacctaactttgtaatgaagcccacaatttaattgacttgtaatcggcctaaaaggttataacaccaaggattacagtccataaaaatgctaaatatgctattttgaattaattaaccctctttcaaaaataaccgccctatttaacgtaataataagacgaggtgatcaaaatgaaagttttaaaattaaatgatttagatttaaacgtcgcattggatgatcgaatgattcaaatttccggtgctcaggacacaacattaattttcaaaagtaagctattagcacactattggttcttcaatttacgggctttagctaagattgcggatcgctatgcgatccaaatcatgtttgagacagagaactacaaataatttgccctatcgatataaagccacaaaaaaagagctgattactcagctctttctatcttaattgggtatatagggctcgaacctataaattccggattcagagtccggtgccttaccaatttggcgaatacccaatatcatcaacgaatactatgatactgcacactccagacgttgtcaattatgatttttaacaaatctttaaaagaggactatactattcttggaggtggttccaatgatgaaaaaagcagaaatcgaaaaattatttgacgggaaagttgccgtatatgatcaagaccacgttgtgattgattggatagattcacgcaggacgcttgaagtcacaattgataacgatattctaaatctactgataaaccatcaggactatattcggaatatcttgaaacatttaaagagacaaacaaatcgcactatgaccaaggaaattattaacattaatcgtcgtaactataaaatcttcatttagcctcgctagagtcaattaaccattgacattacaggctttattcgctaagatattagttgttccgaacattgcccgttggtcaaatcggttaagacgtcgccctctcaaggcggagttacgggttcgatccccgtacgggtgatatttaaaacagcctagaacccagaaaagccgttaaactaaggtttagcggcttttttgtttgtttaaaacgtgtaaaaaagctagcctcctgacgctttagttagggggctagtttttttattgcgtagatttcttctattaaaatggcttcatttgccacaattatttggctaccaaaccagccactgattaaaccttccaccttactgggtacaataccttctattgaacgttctgctttgtcgatttgaaccggataacatttaacaattgcgtcattgatggtattagcaatcatctcagcagtcatcgcctcaatgtgtttttcattgcgcttacgatcttgtacgcggttattcttatctaacactgccgtatgatcgcttaaatagaaaccttgccatttcatcatgccacgatcataataatcatacttcaaaaattgattaaccaaattgggatcatattcatcattattcataggcgttccctccagcatgcccaccgactaagccagcacgctcaattgcagtcgcaccttttactttgctagacaatttgaccaccgatgtaaaaccgtagcgcttgcgaatttcatcgaccgtgctatctaatttctgctttttcaaattaataaactgtgtgtcgaacatatctaattgttccgcactatcgtcaaccaaattgctgcacgcaatactaatatgccgaatcgattcgtgttgccattcttcacgaaaaagttggatggcatgttttgtgagttgctgattagcattagtcgcatcaatcttcattgaacgcccaaaaccaccacgcgatgcatcctcttttgcagcaaatgaaaagccaatccccagactgataaccgtggtcgccttgtgatgcgccctgagacgtgcagccacttgctctgcaatttcccgaatcacaacttcaatctcagcttggataaaataatcgcgtggtaatacctgactattcccataagacttctctttggccttatatttatgccgtacaacggcccgatcaatcccccaactaaacgcaaacaactgcgcgcccatgacacccatttcttgttttaaccgatagggatttgtatgcgcaatatcgtacatcgaatgaatgtgtttctgattcagtttctctgccgtacgatgcccaattgaccagacatcatctaactgggtcactggccacagtttatctgggacatcttcataatgccattctgcaatcaaactgtgattccgtttggcctcaagatccaatgcgagcttggcaagtagcggattatcgccaatccccaccgttaaataaatgcccgtttctttttttacagccagctgaattttacgtgcgacttcgtacggcgtcgctccaaagagttgccaactatccgtgacatcaagtaacgattcatcaatggaatacggttgaatatcttcttctgccgtaaattgctgaaaaatacggttaatcttctggttcacttggatatacaaattcatcttgggtggctcaatgattaaccgtttatcatgaattggaacatcccgggcacgtgttacgttactgataccaaataatttcttagccatgggactggctgccaatactaaaccactgcccgtgtttttctccgtggacatcaccaccaaaatagcctttaacggattcagtttcaaccgaacggcctctactgatgcgtaaaaagatttcgaatcaatcattaaaatcacgcggcgtggttcattctgatagtcatacacgactcttcaccccaacttgaatctgacgcacttgttcatctaattcgcgttgccaccgattaatctcaatcaaggtgacggctgatagatgacgataaataaattgcggaaacttatcgcggttgtagtaataattcattgagtcaatcaaatcatcactatgattcaccgctaatcgccgcaattctaaaactccaaagccatttaaatataaactcaatcctgtttgatctagcgtaatcacttctttattcgtatgcatcaggcacacctctttaattcatcttatgtcctcttaattatacgaacatacattcgatttagtcaagtgtgatttctcagagaacaaaaaacgctcaatcaaattaaatttgattgagcgttaaaggaaccttaaattttaataccaaccgttacttaaccagaaactcttagcggcatcccatgaaccgtaacgacttgttacgtattgatctgcgacgcggtcttgattgactgctgaatagtcaccatttaaatatgatgcggttaattgataacggccaatcatttgaccgttacgcgctgagtatgaaccaccagattctttttgcgcaatccattctttcgctgaactagttgtcggtgcaacagcagctgtttgttgaactggtgcagcttgcactgtaggttgtgcttgaacaactggtgctggtgtttgaacagcggctggttgtgcaacaactactggcgttgtcgtttgaacaggggttgctgtttggtcagtgtcgattgttaattgttccccgacaaaaatcatgttgatatcttgaatgttgtttgttgtggcaatttgattgactaaatctgtgttaccggcaaatttttgggcgattgttgataacgtatccccagttgcaacggtataagtagtagcggcacttgcttttgattgaccaacgaaaagtaatcctgctgttgcagccgttgtcaatgtagcgctaagcaataatgtcttaaaagatttcatgtaatagatgtgctccttgttgttttgatttattaacgtgggactaatataccatcttatattcgcttgtacatgtcaaaaccataacaattgatgacaaacaggtaacaaaatgacggcaattcccgcgctaattgtaatgcacaccgcttacttgactgctattacacaaataacgcctaggacaatcttctgtcctaggcgttataaactaatttattgatgttattcacgacgttttaaatgatacttagagaccgatttttggcggccaagaactagcggaatacgttccacaaacacatcactatagtccaatccaaaccatgaagccggtgtatcagtgaatttttctaaccataaacgcatttgaacaatccctttatccattgctcgaatttgagttgctggtgataaatcttcttgcatgatcacaaacgagaaatcgccaacgttccgatttggaattgttgtgtagcgttgtggttgtgctggtaattctccccgatgaatcatttcttgaatgatttgacgaataaagatgttcactttttgttccatcttaaagcctagatacaactgaacgttgacaatgtagtccgtcccaagcgtatctgcggtatattctgccgtgtacggttcatcagtaacattgaccgcaacaaaccagtaaacttgcgcccgttttggtcgtttatccaaaatagaataaagaatattcttcttaaccatattcttttcatatggtttattctgtggttttgaaagataaaccaaattagtcgtatacatagctaacgctgtatcgtctcgcaaatcatgtagttgttgtttataagctagtaatgaaaccgtacttgccttgaaagtattactttccttaatcgtattactacgataccaaacaaacatgatcgatagaataaacgccgcaattaagactgtcacgtaaccaccatgcatgaatttagcggcacttgagatgaagaaaataacttcaattgtcccgaagaagatgagtaccaaataagccaatacccatttcttctcgcggcgtcccaagtaatggaatagcaagatagttgtcattaacattgtaatcgtaatcgccaaaccgtaggcagcttccatgtgcgctgagttcttaaaatagaaaacaaccattaaacaaaccgcccatagaatccagttaacgattgaaatatagagttgcccttttaacttagccggataatcgaccttaattcgtggtaagaggcgcaacttgattgcttctgatactaaggtatatgaccctgaaattaaggcttgtgatgcaataatcgccgcaattgtagccagtaaaatcgctgggacctttaattgggctggcatcacttcaaagaatggattgaaatcagaaatatgttgatatgccgcaatatctttatgttgtaataaccaaacaccttgtccaaagtaattcaacactaaacaaagcgcaatgtatggccaactaccatagatattcaaccgcccaacgtgccccatatccgaataaagtgcttcagcccccgtagttgccaagaaaacactgcctaaaattagaatccccaccttattctcagggctaaacagtagttcaatcgcataatacggattgagtgccttgagcatcgttagatcccccattaagttaaccaaaccaatgccaccaataaaggtaaaccaagttaacataatgggaccaaaagatttaccgattagatcagtcccaaatttctgaatgaaaaataagaccgataagattgagaccgtcaataaaatcacctgatcttgattattaattaaaacgttcccattaattggcaaaccctttaacccttcaatcgccgtcgtgactgtcacagcaggtgttaacatcccatccgctaataacgtcgccccaccaataatcgcggggatcacgagccacttagcttgcttacgaatcaaagtgtacagtgcaaaaatcccaccttcaccattattatccgcccgcaatgcaatcatgacgtacttgatggtcgtcatcaacattaacgtccaaaagacaagcgaaatactgccgatgataaaatcgcggctgatgtttaccaaaccgccattcccctcaacaattgatttcataacatataatggcgacgttccaatatcaccgtaaacgacgcccatcgtaatcaaaatccctgcaactgataatttatgtccagttgtttgtttagttgtctttaatttcatgatttgttacttccttatactccaatatagcattatcgtagcttgttccagattgaaagtccagtcttatcatcaataattatcaatccactgtattccatgctataatagggacactgaaacaagcgagggatacaaatgaaagataaacgtcaatttgaaattgctaagaagcaatacaagaaactagcgaaccgaccactatcaaaggaacgtaagaaagctgttagtaccgcttcaacttacatgttcacaatcttagttgtggcctttattctattggttatttacttgttcgttcactaaaactgcttacgcagtttttttttacgtatttttttgcagaacatatattgaatattatttttcgtacgtatataattaaataaatagctttttaagcttaaattactacaaaaaacgcgaacattatcgagaaaggcggctctcatgccctcaaaaaaacaagtttatctcgctggcccattttttagccccgaacaaaacgatcggttagatcaagtggctgatttactcattaaaaacccaacgattgatgctgattcacttttcaaaccaggccaacacccttatcctgatgcagaattcggtactttcgaatggcaagtcgctacttttaatgtcgatacgcgtcaaattgaccaagcagacgtcgtagtcgctgttatggattttaaatctgaagaaggcgaattcgaacctgattccggtaccatgtgggaatgtggttatgcttttgcccacaataaaccagtgattctcgctcgtttccgtgataatttaccaattaacctgatgttggctggttctgcaacggccatcttcaatggtgaagcggatattgaaaacttagcgacttatgatttctttgaattacacaataaatatgttcaaacagatatcttttaactcaaaaaagaaccgactgatgcgtcggttctttttttttggcctaaaagccgttattctcgctcaattcacggtaccatcgaccgctcttcttcatcgtgcgctttgcctcatggtccaaatcaacacagtagaaaccataacgattccgataaccatttaaccaagaccaacaatcattgaaggtccaagtatgatatccaaaacaactgctgccggcttcaattgcacgatgtagttgcgtcagatgttcttgcataaattcaatccgatagtcatcttgaatttgcccatcttcacccataaagcgttcttcatcggcaacacccattccgttttcagaaacgtaccacggaatgttgtgataatcatttttcatcatcattgccacatcgtacaatgcttctggataaatctcccatccacgatatggattaatcttccgttctggccaaatataattagcatataagtcttccggtgtttgtgctgggaacttcggattctctggtgcttgaacccgcattggttgatagtagttcacgccgataaaatcgacacaatgatcggcaatcaattgccggtcgccttttttcgtcattggtaataactcatgttttgttaagaggttaattaattcttctggaataacgcccaaaacagttgggtctagaaaactcttagcgagtagtaagtcagcattttgtttagccattaaatcctctggtgcatcactcttagcgtaagctggcgtgatatttaaaataatgccgatctgaccatccggcttcacttttctaaattcagcaacagctgctgtatgcgccatcaaggtatggtagccaacctgaacagccttcttgaagtcaacaatgtctggataatgatagcccgttaagtaaccacattcgatatgcacgataggctcattaaaagtcgtccaacgatcaaccaagtcaccaaacaattcaaacgcagtttttgcgtagaatgcaaaggcatcaactgcttcgcgtgtctcccaaccgcccttttccattagccaccaaggcatatcgaaatggaacagattaatgatcggtgtaatgtctgcatcacgtaagcgcttaaaataatcccgataaaaatcaaccgctacttgattaacatgtttgccatcgggcattaatcgcgtccaagcaatcgatgtccgaaatgagttcaaaccaatcttttgcatattttcaacgtcttcacgatacaaccgataagtatcactagccgtgtcaggcccttgatcgctattaaacttatcaggttgcatctcaaaccatttgtcccaggttgatggggacttaccataacttagggagtatccttctgattgaggtgcggatgttgctgctccccacataaaatgctctggaaatttaatcataaacgctactctccttaaatgtaatcgccaacattttatattgtaccatttctctaaagtggtcgcacacctttctcagtcgattatttaatatgcgtacctccgaaatattatacacgttaaataaattgcagactgagattaatacctgaattattcatacttttcgttgcagttaaaactttgtgcaaagttactttagtgtgtaaaaaaagcagctttttgttagttttgttgtcggactgtttaaaaaaggacagacttcaccctttccctaagaaaaacattttttattttgtgagttcacagcggatatatttttagattttgaatcttgaacagtgtctgccaaaataatttatcgaacacattggtctgagataaatggacccagacttgacgcgcatggtgcgtgaccttagctgccacatggagtaatttaaaacggatcgtcccgacctgagcgtgtttaagctttgttggtaaaactaagttcttcatggcttgcagtatattataagcgaccccagctaccagcatccggaactcattggcctcaaaactagaactgtccgttttatcaaagtgaaagccacgtttaacttctttgatcaagtcttccatggaaccgcgttggtgatagagggcaaagacttgtggaccgcttaattcttccaagttggtcacgataaactcatggtcaaacagaaagttgcccgccggccgcgttgatttaataatcacacgataaggtcgtgaccaactttgaggacaatagtctcgcaggacatgccattggacttcagcttcggtgaagtcctggtcacccacttggatcaggttttcagcccgactttggagctggtagttcgcttttaaacgaatcacgaacttagcctgctttttatcacacgcatggtagatccctggagctgcgaaaccagaatctccccgcactaagacatccagggaagatccgtcataggcccgtaagctccgtaataaaaatttagtcgcaccttgggaagtatagcgattgccggggcgtaattgagcattcaacaagcagcccgataaagcatcaaaggctagtaaaggatgataaccgttggtctggtagtgaccgttataagcactcttttcttggtcaccaaacgtatcggcatgtgtcgaatctagatcaaggatcagctgatgttgatttagctgcccaagaacaaagtgagctaccgagccgagcaatgatttgactgaaaagagcccagacgctgaaatgtgattgataaagcgtgaaagtgtcggctgggaagcgaccgcttgagacaagaccagcttaaaatcaacggcgtgtgacaaggtattagccgactgatcttggcagtatcctgccagcaattgcaacagcaactgcttaaataaattgttcaagggaaaggtacaatatttacggtcatctttaaaatgcaagttatcttctaagagctggtcaaagtgaatttggtgcagaaattcagcaattaataaagttccggcatcgttcgctaactcaccaccgtcattagaaatgttgatctggtcattgaataaaagtttttcatgatgtaaagttgacataaggagcactcctgttctttgtggttttcatcgattttacaatagcacaggatgtgctctttttgtacacccaacaggtgaaaaacgaaaaagatgcgaactagcatgacaacaacaaaaagtagtccttaagggaaaagtatgaataattcaggtaataatatgcattattataaaataatttatttttttagggttttacacgtaaaagggttgtaaactcccgttattttatgatatattcaataacagaaatgattaatactcccccaagtaagatcatttcaatattcagaagatactcggtataggcctttcccaattaaggtttatgccgggtattttttgctttgaaagcaaaaaaaatagtcctgacggactatttttagaagcggtttgttatgcaaaaatcatttggaaaatacctgcgccacagatggcaccgataattggtgcaacaactggcacccaagcgtaactccattgtgagtcgcctttgttcttaagcggtgtgaacatatgcaccaaacgtgggcctaaatcacgagcaggatttaaagctggtcctgttgggccacctaatgaagcaactaatgtcatcaccaataaaccaacaacaatatggccggcagcgccaaacttacctgcaccaattgctaaagcaccgaaaactaagatcaatgtgcctaaaaattcatttacaaaaccattcatccggctatgagcagcatcgattgttacgaatgagcccaagatgccttcttggtttgttgtgcgatcataatatggtttgtaagcagcaaccaataataattgaccaaccattgcacccaagaattgaacaatgatgtatggtaaaacattttcccaagggaataagcccatcactgcaaaacttaatgtaacagctggattaagatggttaccggaaatgctcccaaacataacggcaggaatcataaccccacaaccatatccaaaagcgattaaaaaccaatcactactaaaaccttttgttccttttaattcaacgttggctactgccccgttaccaaaaataatcataattgcagttccaataaattcggcagccaaacgggttgtcaaagaagcgtccactactattcctcctataaatgattcatatttttacgtatcctattataatacgggaaaatgcaaggaaaaacaattgacttttctgtttaaatccctttcatgagaagattcatatttttacagacctttctgtaaatttgacttgctaatatctcataaaatgggataacattcattgattaaccgtattaaccctgattatccgattactgttttggaggttactatatgaacttaatactcgccatcgttctttatgcaggccttgctgtctttgcatttggcattatcctgctcctatttttcttaatttttaaaaaacggcttaaagcccctctaattatttgcttgattggtttgattatcgcggcatctcctgttggctataacttctacatggctcagaaagaacaccgcgaagaactagcgaagattgaaaagaaagataaaaaattcgataaagctgaacgccaattcatcaaacatattaaaaaatcgactgttgccactgaattcatcgctcaaaagtataataaagtttggggcgagttaacagaaaacggaacagttaacgtcgcaaatgttgattataacgatcatgatagtgctgttgctgctgaaggtcggcgtttactagcacaaggtaaactcgatgacgctgatgattactatgtcagtgttcaaggtgactaccaaaaaatgaaagactacgcgactgataacaatcgccaagaactcgtttatgccaaagatgtcttatccaagactgggtcgttcgtctctgttgcaacccgtccaaacggaactttccaagaatacactgatgatgtttacaaggctaataatcaacgacatgtccgcgcaattcagaagttgaaattctcttacagtagtattaaatagtgaatatggtgattttgaaaaaaagatgaaatgggttacaatgaagtagaagactggggagtcttttattttttgattcatagttaaccctattatcgattgggagtgtgagaaatgcgtcacgtcaaattattattcatgattttaggtctaacttttattttaaccgcttgtgggaatccggttaaagcaaagctccacgaaacaaacagtggcttcaatgcgcaaatcactggtaagactaaacataaaaaggtttattggcaaatcggtgataccattcatacgactaaaacaaccgatgatgctttcgcattcgaagtcccttacaaagctaagcagtaccggattacacttgctgataatgaagaaatgcgtaatccaacttatgttgaaggccctgtcgcaaaagaaattgtgcaatggccgaactttattcagatttataatccgattgcccaacaaaaaggactgggcgttttcgaagcgaatccacttgaaggcattcgcactgatcaagttgacagcaacaacgtgattgccatgaacgtcagtgatagcaaagtactggggatctcaattaaagctctcaacgcaggtaagaatctaacgtttaaaaactacgtcctcgccttttcaacaagtatcggaaccaaaccaacccagattactgaattggtcgaccgctcacttaagaaacctgggtcattaatgcaactgacggatcgcgaagttcgctataccgttatgacgaccaataacaacaagcaacaagtcacacaactttcaattaatcatttataaaaagaaagccgccgaatctacgattcgacggctctttttttatatagtggttaaaaaatttcgggagaaattattcacattcttattatagggcgcagttcaatcaaagtaaacgatacggtcggcacaaattagtggtgccaaattgttatagtcactcaaccagctatcccctatcgaatttaaagtgcttatttacggcgtttcttcgtttaaaatgctatattgaaggtaaataaaggaggtcttttttatgtttaattatcagcatattcttatcggtttagatggttctgagttatcagaacgcgctttcagtgaggcgattgaaattgctaaacgcaataatgccgaattagttgtggctcaaattattccagataccctttacacaaatgcacgcatgacttaccctgctgaaacaacgacatctgaaaaacatttcgttcaatcgtatcttgatcaaaaggtgcaattcgctaaagaacacggtgtccctaacgtacgagccatccttaaagtgagttcgccacgtcgtgaattagcctttaccatcccagaagaagctcatattgatttaacagttctcggtgtcagtggtaagggcgcctttgagcggctcttaatcggttctgttgcacaattcatcagtgttcattctaacaccaacgtcttattaattaagccttaagccggtttaaagattggttaagtttaatgctttgtttttgacgtgtcccatttctaatatataataaaggtagtttaggagtggttcgaaatgccgtttgatatcactaaattgtctgatcaaaatattaagcgctggttcttacaacatcgccaagcaatcgttgcaacccttttgcacccaaacacttggtgggcaagttttaatcgccaattaatgcgctttttccaataatcactaaaagtgacgactgaatttgccgtggtcactttttttaatgacgtttttttaaaggagttctgaccgatgaccgagcaaacttatacttttacagcctcaatccaagccgcgacgattggtaaaggcggtgcatatgtctaatttcctggcgatatccgcgcaatcttcgggaagggtcgtgtaaaagtccacgcccttttcgaccaacaaattccctatgatggcagtattgtcaatatgggacttaaaaagccagatggcaacatttgttacattcttggggtccgcaaagacatccgtgcacaactcaaaaaagaaattggcgattccatcacagttgaaatccgtgagtggctatagctattacgcccctttaaatgctatactattttaaatatttatttcgtcgactaaatttagaatgaggattatcaaatgccaaaacacttttacaagcgcgtggcagtcgttttaatactgattaccaccctttttttatggcttttcacaggaccgaccagaagtgaggccgggatttggttcttccataaaaccacaccccaaaaaattgttaagaaaaaaacacccaaaaaaacgatgctcgacatcacacccatttcacaatttcctgaattaccaaccggttgtgaaattacggctgttgccatgctgttagattaccgtagcgttgacatgagcaaaacagaagtggccgatagtatcccttatgtcaatgatggcgatatggaggtcggcttttgggggaatccatacgatgatactggctacactatgtatcctcctgcttggacaggattcttctatcaatatctcggcagtttcaccgatttatcggacgaaccgattagcacgctcaaagctactttaaaacaaaagaaaccaattgtcgcttggattaactaccataaacaaccagcgcattccgtcttattaattggctatgatcaaaattcatttacctttaacgatccatataccggcaaacgaaaaaaaatctcatttgataaattctggaaaattgctgcaccacagggacaccgtgcaatgacttattaatcattaacttgggggatttaacatgcataaacgaaccattgcagtcactttcattactttaagtagtctttcattagctagttgtcggtcaattaaacctgatcaacaagccgcaacccactccgaaagtttagcacgctatcgcgcctcatcagaagcaaaagaaagcaatcagcgtcgatcaatcgctagctcgaaagaagcttctattaaacaacaatcagaaagtatcgttgcagcttcagaatctattgaacaagcaaaacaacaatctaatcagtcaacaagtgccaaaaaagcgctcactgccgaccaacaaacttctgttaatcaagcttttctagcgtgggcggctgaacgcgccacaatcggaaacatggccgtcagtgattggtattttgaccacggtgctgccggatttggcgattggtttgccaattcacctgatggccgcattttagttcaacctgggacagcaagcccagggtttaatgcctaccctgttcatgcaattggtggctgtgtcttttataccgctttggatggaacagtcggtaaagacaatttagatcgtggatcattcgcggataattacagccttaacatggcaatggacaaaccggttagcaaatacctacttggtgataacggcgtcgtgtatgaacttaaattaggtaatggtcacctcacatcaactaatgatggtttcagcgaactaaaagatgacggcaaacaagcttactcagaaccacttgtctttgccgtttctgaagacaccgctgcccaagctgaactaaaatctttacttgctaactattagagtttaaaggagcacgactatgaacaatgccgaactacaggcctatcttgaagaacattcccgcgtcatcgatacatttcgagccaaaggtttagactaccaaaatgaaaagaaccaaaaacgccaacctgccaaacgttggaacgagaataaggtcgatcgggccgttgataaaatggtcgccgaatttatcgctagtattcaagtgaaaatggcattcaacattcgtggtgaacacgccaaagaatatcaaacttggttaacgttcattgaacaaaatgaagttgtcgaaggcttggaagaatcggttaatgaaatggcgtttgaatattagaaaaagtagtttcttttaacgaataattttccgaaaagtaattgcacttgataatattaagggtattgaattgttaattatccttgtgattttcttatcaatattatatgatttacttacgaaaggtggttttaaattatggttaagttattctttaacgagggctcaaaaattgcgctccaacaaaatgacacattatctgcctttggttctacgaatggttcacgccataagttgaccatcaaagactgtgctgctgcagatatcgtcgcaaaaatctcgcactttgttaaggacacgccggcttttatcctcgaaaatagtcctagcgaaacttatcacagctcaaatctcattatgattactacacgttaattaaaagactgccgttggctggtcttttttattttataactcaaaacgccgctctcttgagcgacgtttttctttcagattaactttattgatttaaataattatataagccgcgcatggtcgcatccgccaacgttaatggctgcccatccaacgtcccccgcttaattgcgacgtaatcttcgaaatcgggtacttccagttgttgatttgcgacaaattcagccgctttttgataaaccttttcagcgttcgtttgaccgttgacatattgaatgactaacattgccatcatctccatttttacttttaatattattgatgaattggtcatctttgataaggtcattatacttcgcttactaaaaataagcaatttatatattttattctttatccgtattaaacaaaaagcatttaatccatttattttagaacaatgcaccaaatactgcaccatttcataaaatcaatagactaaatgctttaataaaagtcgaattttatctttataaacgttgaattataggcgttcgtttaattctttgcctaattcttcaaagccgggtttgcctaataaagcaaacatgttcttcttgtaagcttcaacacctggttggttgaatgggttgataccattcaagtaacctgagattgagacagccatttcgaagaagtagatcatgtagcctaatgtgtaggctgtttgatctgggatgttaactgacataacagggacgccgccatcagtatgtgctaagacaacaccttggtaagctttcttgttaacgaagtccattgtgtggccttctaagtagcctaaaccgtccaagttcttttcatcagttggaatatcaatgtcgctgttagggttcacaacgttgacaactgtttccatcaagttacgacgaccttcttggatgtattgacctaatgaatgcaagtcagttgagaagttagcacttgaaggataaatccctttttggtctttaccttcagattcgcccatcaattgcttccaccattctgagaaatattgcaatgttggttcgtagttttctaataattcggttgtgtaacctttgcgataaagaatgttacgtaaagcagcatatttgtatgcatcgtttttcataacgtctgtatctgtgtattcagtgcgggcatcagctgcacctttcatcaattggtcgatatccccaccagcaacggcgattggtaataaaccaacggctgttaatactgagaaacggccaccgatgtcatcaggcacaacgaattcttcgtagccttctgcatctgattctgtcttcaaagcgcctttagcacggtcagttgttgcgtagatccggctcttagcttcttctttaccatatttcttgatcaacttgtctttcaaaacacggaaagcaattgaaggttcagttgttgttcctgattttgagataacgttgattgagaaatcgcgatcgccgatcaagttaactaagtcgtttaagtaacttgaactgattgagttcccggcgaataatacttgtgggaagtcacgttgttctgctggtaacatgttgtagaacgtgttattcaagaaatcaattgcagctttggcaccgaggtatgagccaccgataccaattgcgatgaaaatttctgaatcgctcttaattttagcagcagctttcttaatgcgggcgaattcgtccttatcgtagttcactggtaaatctaagaaaccacggaagtcgttgcctgcaccagtgccttcacgtaattgtgagtctgcagcattaaccattgcttgcatttctgcaagttcgtttgattggacaaatttgtccaaacgggatgcatcaaatgaaatatgtgccatatttgtcttattcctcctgtttttaaacacaagtatacgttaataactttagcttttttagcgctaaaaagcaagccagatcgaccgctttttcagactagacccacctttattttcaaaagaaaattactcaaagtccttgacttgtttcacccatcccgctatacttcagatcatcaaataaaacggaggttactgaaaatgacaaacactcacttagtacaattgaatattcgttggcaaagccgctaagtgagattgtatgccgttatggatacagtcttttgattgtatccatgcggccattcatcagtaatcgattgaattttaagcctacatggattttaactcgaggaaatccatgtaggctttttctgtcccctacatgactgtcatgtgggggacttttttgtttgataataatgagtgcgttcaaaccgggtatatttcgaacactagcctagtggtgcgaatgaacgacgcagtcggtcgtttgtgcgacgtagctaggcacaggaatacggtttgaaaagcacgttaaaaaatagaagtgcgtttgaaacggtttgactctgagcattaacctaatttaccaaattggtgatgtaatcaccggtttggtaaatgtagttaagcacaagagtcagtttcaaaaagcacgttaaaggagctttcgccatgtctaaactcaaacgttttttacccctcattctaatttttgggagtttgctcaccctacttggtatcaaaaaaatcaaagaagccaaccaacctaaattgccaattgtcgggattttacaacccttatctcatcccgcacttgatgaaattcatcgcgggattgtcgctggtctagcaagcgaaggctatcataacaaccgtaatatcaaaattgattttcaaaatgcgcagaacgatcaaagtaatttacgtctgatgagcaatcaattcgtcactgaaaaagccaaagtaacggtcggcattgccacccctgccgcacaaagcttagccaatgccactaagcaattaccgattatcttaggcgccgtgactgatccggcgagtgccaatctcgttaagaacaacgcccatcctggtgccaatatcaccggcgtatccgatcaagccccgattcaaaagcaattggcattaatgcaaaccatcatgccgcaactgaaaaccgtcggcattctctattcaagcagtgataactctgccaccagtcaaatgcacttattcaaacaacttgctgaacaaaaagggctgaccgttgttgaggccagtcttagttcagtcaacgatctggaacaagtcagccagaatctagtcccaaaagtcgatgcaatttacgttcccaccgataatacgattgctagtgtaatgggcaccctcgtccatgtgaccgacaaaaccaaaacgccagtctttccatccgctgaaacgatggttaaagatggcgggctcgcaaccgtcggcctaagccaatacgacttaggcgttgaaaccggtaagatgaccgccgctgttttaagtggtcgttcaaaacccgcaaccactccaattcggtatttacgcaaaggacatttagtcttaaacctcaaaaaagcaaaagccctccacatcacaattccgcagagtttaatgcaaatcgctaatcaaaaaggagctgttctcaaatgaatcttattatctcaaccattgaccaaggattattatggagcctactaagcctaggcgttttcatcacctttcgaatcttaaaattccctgacatgaccgttgaaggcagtttcccgttaggcgcagccctcggcgctttaatgttgcaacaacataacattgccttttccctattagtcgcattcatcggtggctgtttagccggactcgtgacggcaattttatacaactacttccatgtccagagtttgttagccgggattttaacgctaaccggtttgtattccatcaacttgcggattttaggccaagccaacatggcaattggtgatcaacacaacctatatcaactgccgctattccatcaattaacgctcgatcaacggctcttagtcattaacctagtcatcatgctgatcgccctattattactggctggcttactctacaccgaattcggtcaatccctgattgcagctggtgataatcccacgatggccctctcacaagggattgccgtaaagcggacgaaaacgattgggatcgtgctgtcaaacggcttgattgcccttgcaggtgggctcgttgcacaatataacggctttgctgatgtcaacatgggcatcggtgtgatggtcattgggttatccgcgatcatcattggtgaacggctccttgtcggcaagcatttcatcgccaaactaattagcattatcctaggaagcgtcgtctaccgcctcatcttactccttgtcttacaactcggctttaacgccaatgatttcaaactcttctcggccgtcattttggccatcttcatcatcgcaccacaacaaaagaaaggactgactaccaaatgaccccgcgtatgactttaaaccacctcaattttgaagttactgataataatgaacctaaacaactcttaaatgatttaaatctcacgattaatcctggtgaatttgtcgtcctccttggcgcaaacggtgcgggtaaatcgactttttttaataccattgcgggtgatttaacccccacaagtgggcaactactattcaacgaccacgacattacgaagcaatccgcccaacaacgcacacggctcattagtcgtgtctaccaagatcctaagttgggcaccgcagctgatatgaccgttgccgaaaatattttgttggcgatgcgccgtggccaacgccgccgcttatttccccggcgtctcaagcaacaactcccacaaatcaaagcgctcgccaagacactcccgaatcacttggatcaacaactcaatcgcccggttagtaacttgtcgggtggccaacgacaaacgttaaacttcttgatggcgacgattcaaaaacctgaattgctgttattagatgaacacacatctgctttagatgcagtttccagccaagcattgatgacttttaccaatcaaacaattcgcgataaccaactcacctgcctaatgattacgcatgatttagaggatgcgttgcaatatggcaatcgactcttggtgttaaaagccggtaaactgattgccgacttgaacgcgactgaaaagcaagcattaactgtcgatactttactagactatttaaactaatcaaaccgcgctaaccattttcggatagcgcggtttttgctgcttaaatccattcaatcttatcaagcaccaatttatcagcggttaattaattaaggatatgattaacctacgtttaacacttgtaatcgttttctaagtatgctaaattattcccataaggttgtgtgcaacctaattattgatttaagggagatctgtataatgacagttactactcaaaaaactattccagctagtgttgctatgcttagagttatcgaatcttggggcgttgatcatatctttggttaccctggtggctcatttaactcaacaatgaatgctcttaatattgaaaaggatcgtttaaaatatattcaaattcgtcacgaacaagttggggcccttgccgcagctgctgacgctaaattaactggtaaaatcggggttgcttttggttcagctggccctggtgcaactaaccttttaactggtttatatgatgcaaaagaagatcatgcaccagttttagccttgattggtcaagtaccaagcaagaacatgaactacaactacttccaagaattcgctgaaaacccaatgttctctgacgttgctgtttataaccgcctcgttatgacacctgaaagcttgccatacgttgttgataaagcaatccgtgaagcttacaaacacaatggcgtcgcagtggttgttattccaaatgacttcggctacgttgaaattccagatacaccatatagctcaagctcaccttcagatcgtaaaaaagtggctggtccagtcgcaacagacgaagaagttgatcaattcttagcaatggttaaagacgctaaacgccctgtaattcacgttggtcgtgggattaaagacggcggcgataagctcgttgaattatcaaagaaacttcaaattccaatcgtcatgactgggcttgctaaagggttagtgcctgatagttatgaaggtaacttaggcatggctaaccgggctgcttctaaagcggctgatgaaatcatggccgttagtgatcttgtgattgccatcggtgctgacttcccatttgccaacttaatttatcggacacatgacttcaagtttatccaaatcgataacgatgaagcacaatttggccgtcaccatttcttagacttcgggatctggtcagatgcaactgcttttgttgaaaaagtaatcgccagaagtgaaacggttgccccaacaccattcttcaaagctgctgttgctgatatggcaaactggcaagcctaccttgatgttttaacgaaccgcgactctgatccgcttgaattcgaaccaatctacaaagaaatcaaccggattgctgaagacgatgctgtcttttcaatcgatgttggtgataatatcatcaacagtttccgtcacttgaacttaacgcctaagaacaaatgggtgatttctgccctctttgcttcaatgggttcaggcgttcctggtgccttagctggtcaattgagctacccagatcgccaagtcttcaacatctcgggtgatggtgccttttcaatggtcatgcaagacttgatcactgaaaagaaataccaattaccaatcattaacattatcacatcaaatgccgcattaaacttcatcaagagtgaacaagatgatattccaatggattactcaggaatcttcattgaagatcaagattttgccatgattgcgcaagcaatgggcattgaatcaatcaccgttcgttcttctaaagaattacccgctgcctttgacaaagcccttgaagtcacaaaagctggccgaccattcttaattgatgctaagatcactgacaaacggagtattccagttgaagaattagaactaaccattaaagatggtaagttaacagaaacaattagcgcaagctatgatgcttctcgtcctgctggcaaagaatacagcgtggctgatttcttcgcagaatacgatggtcaatcactgaagacattaccagaattatttgaagaaaacggtgttgaactataaaacaacccggccatcataaaaatagcgtctcaacacattgcggtgtgttgggacgctatttttattgatttaatttttggtaatggcttctttaggatggaaccaaacgacgttcttgtcgaagaatgagactaagtcgtttgataagtacaagatataggtgaagaataagacccaatttgaaccaccctgcattgctgtaatgccccacaacgtgattgatacgatactttggatgaaccagaagtaatagctttctttaaaccgtaatgtggtcaacagtgcgccagtaaacccaactgaagcggcgatactatcgatcaatggtcgtggactgtccgtcatattgctttcccagagatataataacccaactgatacagcaaagaacaatagcgtcaacgcccaattacgaagtcctttaccacgagtagcaagcccccggacttttttatcaacgttttgcgcccaatctggcattaataagactgggatgtctaacataataatgtagacggtttgtaataacatatcgttatagtttttagcattataagccacaataatgtagattaatgcagagatgacaccaaagacaccatttaaaggtttcgtattcgtaatactaatagtacaggtgaagcctaacatccccgcgagcatcgttaaaaacgacacgccagttattggaccaccggaaatagtagcagctaaaataaagcctaacccaaacatcaacaaaccataactggatgttgtccaccctttcatctgttgaatataccacttaggattaaatacactggtgattgcacgattgtcttgcattgaactgaaaccctctttatatgaatttagttatcactccagatcgtcaacaccattttccatatattgatgcaccatctgacgaaacaacactatatatggtacacgctaagcattctaatttaaactcttgtatttaattcaatttgtggtagctgatttcaaagcctttctgaaagtgccgttaacttacgattgcaagcgctgaactagaccattcgaaaatattttttatttttagcgttcgttgtcaagactcaattcaatctttgaccaatggcttaatagtctctttgatcaattgaccggagaatgacttcattaacgcccacattatctggtgtatcgatggcgtacattacggcattagcgacatcggttgctgttaatccagtttcagtttcgctcttgagaacagctgctcgtaattgcggatcactaatccggctggctaattcggtttgcgcatgtcctggagagatcaacgttgatttaatgcccattccaacttcttctacacgtaacccttccatcaccgcgcgcattgcatatttagtggctgaataaacggataagccttcaccagtgaaatgaccggcaactgaatccgtggtaatgatatgaccactcttttgctgttccattaaaggtaaggcatatttaatgccatatagcgcacctttgatattaatatcaatcatagtctcccactcatcgactttaccatcgcgtagcattgagacgggcattaagccggcattattgaatagcacatcaattctaccaaatttagcgattgtcaattcgattaaggcttgcatgtctgctaattgcgtcacatccgtttgtcggtaaataacctcagtgtcgtattgagcggttaacgccgttgccaacgccgccaacgcacttgttcgtcgagccgctaaaacaagttttgcgcctttggctgctaataaggtagccgtctctttaccaatcccacttgatgcaccggtaatcacaacgactttattttgaatatcattcatttcttttcccctcactttttagttgataaggttagtatatcgggtacttcgcaataaacaattacgcactttcaactaactaacgcacctcaaagtaagttttgtgaaatcactaaaaagacgacaacattctttttgaataaatgttatcgccttctttaaatatcgtatttctcatggtctcgataatccaactgcacatcatcaccattgctctgtaaaaagtcgattctatcttcgccccacttggccatcattcctaggacggaaaccaatgatttgccgtacgcagaaatcgcatactccacgtgtgggggtacttcgttaaaaacttttcgagtaatgatgccatctcgttccaattcacgtaattgattggttaaaactttggctgaaattccctgaacgactcttttaagttcggccggtctttgaggtcctgccacaagatgacagagaatcaacggtttccatttcattccaatcactgataaagtcattaaaacaccgttggtataatttttttgtggctcgttcaaggcctttcctccacttcttgatgctgatttgtttgtctatcataccatcaaaaaaaggatcaggacaatcttatctgtcctaatccctgattaattattctggtcgataagccgctttagcagcgttcatcgccgaccatgccttaggccagccgacataaaatgataaatgcgtaatcacttcgacaatttcagcttcagtaatgccgttttccttatcaatctttaaatgcgctggtaattattcaaaattaccacctgaaatcaaggcactgatggtgattaaactccgttgatgtgctggtaactctgattcacgcgaccaaacttgcccgaataaaacatcgtcgtttaattcagcgaatttaggtgcaaaatcacccaatagatcgcggcctgctgtttgtttctttgccattttaaaaacccctttctgaattaaagtgcgtcataaagcgcatttgaaacagcttctaaccattctggtgtgccggcagtgatggcgacatgactaaaccagctatccttagtggccccatgccagtgtttgatgccgtctttagtaacaatcacatcccctgggactaagtgttgtgctgctttaccttcttcttgataccagccttcgccaccagtcaccaatagaatttggtacccagcatgatggatgtgccaattgttccgacaaccaggttcaaacgtgacattcccgacaccgacattcacgtctggttcgttcactaacattgataaataactttgaccgacgaagaagtcttgataagccacattagcttctccaactgggaataattgtttttcttttaattgttcattcttgaccattctaataacctcactttattaggattcaaatcgttgtaaatacgtttcaaaactctctgcttgatcgatactctgatccaatttaccatcataccaatcaattttacgcgttaggatctgtaaatttgcttggcgctcagccaattcggcttcagcttgagcctttgttttttgcaataaagctttgcgcgcttcaatcgtcgcgtctccttgagcccgcaatgcaacatattactttaattctgtaatccgcataccggtcccttttagatggagtataaacccgacccacttaacgtcctctaatgtataaaagcggacaccggccgcatcgcgttgcggcataatcaagccttggtcttcatagtaacgtaatgtgtaagtcgacaaaccaactaatttagcaaactcgccgattttgtactgctcttgtgccatcgacatccctcctacaaaaatagcttataccttagagtacactataaggcaagttttttaataaataggacgatcgccatcaatattcggctgattaatgccccaacttgccccaattcctttttcaggatgattaactaaatcaacaacaacttgcgcgatactccgtcgtgaaataatcgtccctttaaacggtgttcccttttcagttaattcgtaatcgatccgatcttcattggtcatataggcacaacgtaaaatggtatagttaagcgaagattgttcaacaatcttcgccgcccgccgcgtgtcatccatgacttcatggccgactgcttgttcattccactcaccaaaagcacctggcacttcatgatacaagcctaatccactgatatagattaatcgtttgatgcccgctgcagtcattgtcgcgacaacgttttgcattaatggttcgaactgcccgcctaaatttgcgtaaacgatatcgaccccagctaaactgtctgccaacagctcttgatccaacacatcaccttcaataaccgtgacatgtggattttgtgctaatgcgcttagccgttcagcgtgccgtaaatatagcacgagctcatgttgattttctttcaacagttgctcaataactaactgggccacttgtccggctgcccctaatactaaaatgcgactcattttaatcaccccttctttaatgtctttagcatattccttaaagtacactcgaaggcaagccatttttcaaatttaattggtctaggttgctacttgactttcaaattaaattgactaaaatgaaagttgttattaattataatcattataaagtaataaaaagtattggaggcttcaccttgtcaaaaaaattatcactcgcccaaaaaattaacgtgatgcgggctagcgtcatgggtgccaatgatgggattttatccgtcgccggaattgttatcggtgttgccggcgctacaagcaatagcttcgccatcttcatttcgggaattgccggaatgattgctggaacgatctcaatggcgatgggcgaatacgtctctgtcagcacgcaaaaagacgcacaggaaatggcaatcattaatacgaaattgaatttaaacagtaattatgcgtctcagatggcttttgttcggcaaaaatacgtcaacactgggattgatcctgaacttgccaatcgggctacacacgaaatgatgactgctgatccgttgacgactgtcgtacgtgaaaaatatgggtttgtcccgactgcttttaccagtccttacgcagccgctgttgcgtcattcatctcatttccaatcggttctattttgccactagccgcaatcaccttattaccccaaaccattcgcgtgcaagccaccatcattgcagtgatgattgcccttgcgctaaccggctacagtgcagccgctctcggcaaagcgaatcgttcaaaagccatgttgcgcaatgtgatttccggattattaaccatggtagtcacttacgctattgggacattattcaaacaataatcgcttagaaaggatttttttatgacccctcttaaagccccactcaaaacaactgaaaaaccccatcaaacgatggaagaaaagatgaatacccttcgagccggcgttctaggttctaatgacgggattctaaccgttgtcggtgtgctctttagtgttgccgccgcaacaaccaataatttcaccatttttatcgctggacttgctgatttattagcctgtgctttttcaatggcggcgggtgaatatgcttcagttagttcgcaaagtgacacggaaaaagccgctgttgccattgaacaagcacgcttaaaaacagctaaagatgatcaaattaaagaagtccaagctttttacgaagccaaaggtgtcacttctgaaacggcactcgcaatcgctaaggacttaatgcataagaagcctttagcaacaattgttaatgttaaatatgacctagagcttggccattatatgaacccgtgggccgcagcgtttgcatccctcttctcagccgctttcggtggcgtcttcccccttgtgacaatgattctactgcctgaagcctacaagatgaccggcacaatcattgccgtcaccatcgcggtttccattaccgcgtttatcagcgctaaactgggcgatggcaaagtcaaagtctccattattcggaacatcctaattggtttaattacaatggccattcactacgggattggccaactcttctaaagaaatccgtcatcatttgttctaatctaacttaaattcagccacaaaaaaaggcgtcgagcttaaattaacttttagctcgatgcctttttgcttatctaattttagttctcaagaactgggcaattttttcatggccagcatcattgggatggagactgtctaaactcagctcagccgcttgttgtgcatccgcaaatgacaacgctgattcgttaaacaaactgatatgctgaacgccaaacaagtccgtcacttgcgcaatcgcttgttcataattttgttgctgataaccgccttgattgacggccgaaaagaagtcagtcccaatgtgaacgtgcgagataaaataaaccgtcgcttgtgggtaacgtttcgtaatctgcccaagtaatttttgtagtgcgccgtagaatgttactgtggactgatcaccaaattgaccaagtggtacatcacgaccaaagtcattcacacccgcataaatcaataataaatccgttgattcaggaatggcttgccagcgttcaaccatcggatcatacggttgggcaatcgtcgaccccgaaattccgagattggtgattgtgggaatcgcgagccattctgctaaccactggtagtaccatttgtgtgcgtaatgattacgttgatccgtgatgctatcaccaagtactgttaaatgttgatattgtgtcatttgctacttcgctcctaattctgagtaatccgtcagttgccaactaaattgatcccaataattggtttgctttaatgttttaagcgcattgaattcggctagccgattcgtcgtcagacgactcttatgccgtaactctgccgataaatacccaatatggcttaagatcaccggcgtacctaccaaatttttctgtgtcagttgccgtttgatttcctgtggcgttaaatacggtgtttgttgcgccgttatcaacgtcccagtcgttaaaacggcatattccgatattaatagcaggtaggacgcttgttctgtcggtcttaaatgcgccgtttcattgcgaacagggacatgatacgtttgcgctagttctagaacaattgcatagatttcaggcgttaacgttgccacaaaatggtgcgatgtcaaatgcgtgagttgtaacccactcgccaaaaagcggtcaatctgcgcttgaaactcacgcttaacatcagtaatggccaactgttttggatgagtttgtaaggtttgataagcatgacaaaacccagccggggttaccaagctgggaatcgtcagtggctgactaattgggcggtctttgtcgaaaaccaagtgcaatcccattgccgtaatcccatgttgctgggcgagtgccgcactcatttcaaaatgaggcgatgtcacttgcgcattagtggtagaaatcacgccagtttttaagccagtaatgattgcgcgcgaaatcggtatggtcatcccgaaatcatcagattcaataatgattggttgcatcttaacccacctattctgccgctaagtcgaactgtccaacaatggtgtcagtcgtaactgttgttggtagtggctctgctggtgcaaaggtggcgttactgctgacgaccatgatagtcgttgccttttgggcggctgctagttgttgccagtcaatatcaacaatcgcttcgccagctttgacacgatcacccgcttcaacgtgcatcgtaaatggcgcgcccttcaattcaacggtatcaatccccatatgaatcagaatctcaacattttgttttgttgtaatcatgatggcgtgtttagtggggaaaatcgaactaacaacaccatcaattggtgcgctaatcgttgtttgccgttcatcaggggtaatggcaaagccatcgccaactgccttgcttgcaaatacttcatcggtaacttgttcaattggtaaataactgccagcaacgggggctgttacctgtccaactggtccttttttcaaaaaattaaacatcgttcttcctcttttcttaaacccgcatcatgatagcttcataaggtcgtaaagtgatttgctgaccatcaaactgcggttgttcgtaattatccatgagcacgtccttgacgtgtggtattgaacggacttgtgtttgaccagtaaaattagccatcacgcgaatcgtttcagtatctaggtgtcgttgataagtgtaaaccgcttcgtcctctggttcaaataattggtagtccccttcaattaaaactggcataagcttacgcattcgcactaattcttgatagaatgcaaagacactattgggttcatgaatcttagcggcaactgagtaatcatcgtgctcaaccggcattaaccatggtgtcccagtcgtaaacccgtgatgcgccgtttgatcccattgcatcggaattcgacagttctcgcgtaatttctgctgtaaaatcttaatcgctaacgcttcatcaatcccgtcgctcaacatttgctggtaagcattgatggattcagcatcttgatattggtcaacggtggtgaagttcgcgttcttcatcgcaatttcttccccttgataaatatacggtgtgccttgtaagccaaattcgactaatgctaataatttagcggattgatcgcggtattgaccgtcatccaagaagcgcgaaacggcacgcggctgatcatgatttgaccagaataatgcgttccaaccaccaccggcagccatccccgtttgccaatcactaagcacccgttttagatcagacagccgataatcgcctagtgtccatattttttgccaccggtataatcaaccttcacatgatggaaggtaaacgccatcgataactcttcacgggctggattggtataacgaatcgcttcatcaattggggttgaggaaagttccccaaccgtgacaaattggttcgggccaaagaccttttcgtacatttcatgaatgtattcgtgcacatgtggtccattcgtatagaaattgcgcccatcgtcgcttggcgttttaaacgtatcattcgggaagtctttatccttcgagatattgttaattacgtctaaccgtagcccatcaatcccaaggtctgcccagaattgcatcattttaaaaatctcggcccgcaagtgttcattccgccagttcaaatctggcatgctcttttcgtataggtgaagataatattgatcaagtactggcacatattcccaagcactgccactaaacttggataaccaattatttggttcgtgtccatccactggatcacgccacaaataataatcatggtacggattatccttgcctttgagactctcttggaaccagcggtgttgatcagaagtatggttgaccaccatatccatcatgattttaatcccacgtttgtgggcttcatttaagagtcgttcaaaatcggttaaatcaccaaaaatgggatcaatgtggtaatagtccgcaatatcataaccgttatcacgaccgggggaaacatacattggcgtcaaccaaatcaattcaatcccaagattttgtaaataatctaaccgttgaataatgccgttgatatccccgattccgtcaccgttggaatcttgaaagctccgcggataaatttgataaactgttgctttttgccaccatgccatgcgatatctctcctatttcagtcgtttattttgctgttcctggtttttgtggtttagccattgcttcaccagctgtcatttgatcgttataaccccaaacgagcgttacaataaatggcacaatcgttgcaaccgctgatgacgcgatgaaaatccataagtttgataaatctgctaggtgttttggatctaagaatgatgcaaagccgatccacgaccccgcgaaaccgaacatattaccgtggaataacccactgacaaatccgccagcggctgaaccaagtaaaccggcaatgaagacgcgtcggaacttcaagttgaccccataaatagcaggttctgtaaccccacagaatgctgaaatcgcaccagcaaatgataattcttttaaagctgttttacgggtcttaatcgcaacagctaaaacagcggccccttgtgcaatcattgttgtgcttaaaatcgcgttaaagtaactgtgacccgttgcggcaacatcgttggcaataattggtaaaatcccccagtgtaatccgaagataacaagcacttgatagaatccaccgattaataacccagataaccaaccactctttaataataagaattgaatcccgaatgctaaaccatttgataaccaaataatagcaggccctgtgatgtaaagcgtaatggcagaaacgactgcaatcacaatcaatggtgtaaagataatttgtaagtagcctggtaaccagcctttaacccatttggttaatttagcaaccaagccgcgagaatcattgggaaaatcgaatatgtgtagttgaccattgggaagtttaatgacccgatttcaagcaatgatttcccgtttaaagccactaattaaggatgcaccagaacaccaccgatgacagcggttaaaactggatcaccttttaatttcttagcggcagtgaacccaaccaacatgggtaagaagtagaaaacagaatcacccatcgtacttaagacaatgtacgcttcactcttagcacttaataacgcgccaagttgtggcatcgttagcatcgccaagacaccttttaaaatcccgccagcagctaagataccgacaatcggactcatcgcaccggtaatcacgccgattaattgattaaaggcttctttaacatggccccatggcgttaaattttgttggcgcgttgttgcagccacaacttgggccgtttcatcttcgccagcaaactctgtcccgatttctgcaatcacggcatcataaacggcagtgacttggttgccaatgaccacttggtattgcccagaggccttttgaacgttaatgaccccatctaatgctttaatttcttcggtcttcgcttttgattcgtcctttagataaaaacgaagccgtgtaatacagtgaattaaactatcgatattttctttacccccgacaccggcgacaattgcctgtgcgagttgtgaataatccttttgagccataataattcctcccgaatcttattgaattaaaagtagcatgaataaaagcgctttctcagtacgccgtaatcatatatcatgtacgtacaagttttcaacactttttaaaaccgttttcttgttagcgcttaatctaaccttgcaacttcaccgaatccccgttatgataggaatgagaaaacaaattggagaatatcgaatggctaaaaaatatgaaatgatttatcgagatctcgtgcgcaagattacgcaccaactctatcaaagcggcactttcttaccaagtgaaaatgaactcactgaactctacggtgcgtcgcgtgaaaccgtccgcaaagcattaggtagtctacttgaaaatggctttatccataaaattaaagggaaaggctctttggttctcggtctagacaagtatgcttttccgatttcaggattgaccagttatcgtgaattagatagtcttttcgatatgcatactgacactcaagtcttgcaattaacacagacgaccgttccccaaacccttttccatcttgaatccgaagagcagttacctgccacttacattcaacggctgcgcgtcgttaacggtcagcccctggtaatcgataacgactacgtcttaactagcatagtcccccacatttcaaaaggggttgcacaagactcactctatcgttactttgaagaaacactcaaactcgaaattgggtatggcagtaaggagttcacggtgattcccgccactgaagaacagtgtcagatactgaacctaccgcctaacagctccgtagtcagtgttaaaggtgtcacccatctacaagataataccctccttcaattcaccgaatcgattcaccgtgccgataagtttaaatttatcgaacatgctcggcgtaaaattatctagtcaaaaaaaacgacacccaccggctgagagttgccagatgggtgtcgtttttttatttgactgcctgtgttttaaaaacagcgatttgatttaaaagttcactaatgcgtattcgatcactcttttgttgttgacggctcgttgtgagtttctgatataagtttaactcatcaccctcgttgaaggcggtgaccatggcttcagcggacgagacgtaatcagtcattactaattgtaactgacggttaatttctcgtaattcttttggcggatttagtaatgtggcttgatcaataaattgtttaaaaacccgtaagttacgttgaaaatattcgtttaacgattccaaattttcgtccaccagacagcgccctttgatgatgttcttgctggtccgggtgtactcactaaatactgtttcaaacacgataaaccgttctaaaaattgattccaccgtacgatgtattcctgagtcgatagttgatccgctttgacactcatggtcgttccccctttaatataatatctaaatactcatcatgagtataaatatatactaagtatagataaaaggctaattattagcctttgttaccgataacgatttcaaattgcgtttcattttacaaataaaacatgacgtcctatagttaaggtaagccaaaaaaaggatctgattacttgtccaaccaacgttatctatctggaacagcactaaaactatttacattcaccctactaaccggcacgttcacaatgtctatcagccaatctgccctttcaactgcttatccaaccttaatggcctattttgatttatcagccacaactgttcaatggctgacaaccggttttatgctcgtaatgtgtgtcatgatgccgattagtccttggttattaaacaacatcccattcaaacgactctacatggggattttaagtttatttactattggaacgctattaattgtcttcgctaatcagttcggttgggtattgttcgggcgggcgttggaagccatcgcagtaggtgttttatttccatcgtttcaaactgtcttattaaccattactgctgaaaatcaacggggccaaattatgggcctggctggtttagtaatgggctctgcactagcttgtgggccgattatttcagggattattctcaactacttcagctggcgaggactattcatcgcctttattctgattatcttaaccgtgttagcaacagctaacttcactatttctgatattatgccggctaagccctatcaccttgatggtctttccgttttatgtacaactggattaatcggtttattatatgtcatcagtagcgctaatcatcctactatcaacccaatcggactctggggtatcggattagtgagctgcctagcactgggttattttgtctaccggcaactcacccagacaacgccacttcttaatttacatattctcggttaccttaactacgatattgcggtcggattgactgctatttcctatatttcattgattgtcaccacagtcatctacccattatattttcaagctcaattgaagttgacgccgcttctttcaggattagcattggtccctgctgccgttgtgttaagccttttgaatccactcgcgggccggttagctgataaaattggctttaaaccgaccttactcgttggcctaaccatgattagcattggatggctagctttgattggcttctaccaatggctgtcattaccattgatgatcctgtgtgcctgtttcatcgaaggcggcaacgcatttgtcatgatgcctgctgttacacttggtgctaatagcctgccggatcaagtgctcgctgacggaactgccgtcacaaccacgattcgtcaaattgcgggcgcgctgggcgtcacccttgcaactctccttttaagtgtcgccggttaccaagtcgtatttgttagtttgctcggcctgaccttaattggtctcggcttagccactcaactacaccccaaataagccacaataaaaagcaggttagcgatgatgattgtcatcgttaacctgcttttttaatgccagcgttgcttaattaagataagtccccatgtcattaaactaaatgttgaaatgatcgcgccgataattagtcccggcgcacgatagactaagcgaacttggttagtccctttctcaagtggcactgcaagcatattgcccatcactcgtcgtgtacgaactgtttgatgattgacttgcgcatgccaaccactgtcatacggcacacttagataaagtaattgatcagcggtcttagctggtactacaccagcaatccgaccattatctgccgacagttgttttaggtcgatctttaagcgttgttgtgccaactgatcaaaagcttgatcgaaatgaacctggtctaaactagccacctgaatcttacgaaaggctttaggttgccgactggtaattgtcagcgttagttgttgccctttttgatagcgacccaaaccaataatcgtggtcccattcaattcaatcggtgctttatgtgttcggccattaattttcactttgagctttgataagttttgttgcggcaagtatagataagcatatccacttgtcttaacttgcgttgtaaacgtaatttgccgacgtttttgcgcttgtaaatctaattgattatattgataaaatggtgtcgtttgccccgtcatcgcctgcataattcgatcttgattttcaaacggttcatgtgcttttaaagccacgtgtgctagctggtcattaaccgcaaaccctaagcctaacgttttatggggttgtgtcacaacctgtccttgcttagcaattaggtcatattgattggcaaatagcagatcagtcagcacagtatgcccaatcccgttaatccgccgggcattcttactataaaaaccgagattaaccaacatcgtccgcatccgctcatcaagtgtcgaagaataattgttcaatgtatactgtccaaaggtcaacgcatcattgtacccataatacggttccttaaacgctttttttaagagaatcgcttggttattaacgcgatagaaatcaggtgtttgccgttcaagctgttcaaagagtgctgcttggcgttggtattgttgcgcataaacaacttgatcgcccatcggtaacttagtggtcgtcaagcggccattaatcaccagttcactaaacgtcaatacggttcccagaccaatcacccatggttgccaacgtgctcctttttgccacgctgcaaaaataacgctagccaaaaccattagtccgattaacaaccagagcgattgtttctgcacaccacgtacatgtggcccatagtagagcgccaactggccaatgctgagcaagccaccgactatcaaaataaccaggcgtttcgtttgacgtttaccgattggttcaatacttgcttcataggcaattttgatgagaacaaatgccatcaaataggtattccgatatggaaacccttctggttgctggaacatgtgccacatcgtattaaatgtcgttacccagaaacttaacgctaaactaacaattaaaaagccgttcgaccactttgcttgccgtcgaatggttggtagacagaaataatagaccgcaaataacagcgctaatgtactgataaataaagttggttcatgaattaagcgttgcgtataatggctgccgccgacttgaaattggctcaaaacttcccagccaaactgcggggttggataaaaactggttgcagcgattgtctttttcccagtcttcaacattccaagtaacgacggcaataatacaactgctgttgtgccccccgcaatcaatgacgcccaacaaaactgccagatagcctgccgccagtgaaccactagttgccaccaagactgttggggttgtttccatttgattaacaaactaattgcatacaaaacggcaaatagacatgacatataacccaagtaatagttggtaaagatagtggcaaccaacatccagatatataagccaggacgcccttttaaaaatagccgttctaatcctaagatgaccagtgggaggaaaatcagagcgtctaaccacattaggttataaaagttcattgccacaaagccacttaaactataagctgttgcaaaaattagcgcggaaaaatgatattcaggctgacgcgtctttagaaaatgggccatcgttaaacccattgccccaatcttcaaaataatgacatacccaaccaccactggcaactggctattcgaccaaaataggagcagtaaattaaaaggactgattaaataataagccgctagcggtaatatatcgccacccagtgaaagtgaaaatgaatacgtactgaaattcatctgggccatttgccgtttaaactctgccaaaaagggcatatattgggtaccgagatcactaatcaataaattatgccgtccaaacggcacaatttggagcattgcatatagccccaccattaataacatgggaactagcacactcaataaatagtaactgacagctgttttatttgttctcttcatctgactcacttcttttgccttttctatagaataatacacactctaaacaaaataagccacccagacaatttgtctaggtgacttattagtaagttgcttacttcatcataccgagggtgaccccaccgacaatgactaataaacagccaagtgtgacgtaaaccatttcttttttcgttttttgttcacccaataggtaaatactaccgattgttgagatgataatgccacattgtgataatgaatagctaattgctagaccaatatcattcattgaaatcaacataaataagttcccaagaccccataataaaccagtactaatgttgagtgctgttttcttattgaagaccgctgtcccaatgccaacaccggcaaagattgcagcaccgacgaacatcccaattgcttgtggtaaaacaattgatgttgcgccaatgtgtgaccagttaacgatgattgtgtaaccaccataaccgattgttgataagattaatgctctaaaaccacgtgcaaattgtgtatcttctttagcagcaacactgctcttcggatccttcattgaagttaacgtggcaccagcgattaagatcactaatgcagtaatcccgaagatgtaatcgtgcgttgtcttccattcatggaataacaaagctcctgctaaagtgtttacaatcagttgcatcccggttgataatgggactgtcttagaaacacccatcgcttgcattgattggaactgttgtccttgaccaatgctccagaataaaccggaaatgataccgattaccataatccgtaagtttaaagcgggttgtaatactaaaaaggtaccgattccaaaaaccagcgcaccaattgtcattcctaaggtttgttgataggcattcccgccaagtttgccactcactaacccgatactaccccatgcaagtgcagggattaatgcaattaaaatagccatttataaattcctcttcttctctaaagtacaagaatccattatacatagttttatatccgctggctagtaggaaaacggcaccattcaatcgttaccagccttcactaccgtcatgtaagcaactgtcccagtcgtgattgcgcttacgtaaattttacgtaaaaaagcgttttttttagtaaaaaaatcaacgataagcgttttcttaccgttgataaccttaatgttttcgctttgcatgttgtaggacttgatataacaggacgccaatcatcacccctaatgtattaaacatgagatcatcaatatctgccatgccagtccctaaaacaaactgggcggattcaatacacagggataacagagccccttcaataatcgtaatcaaccaatcccctttgcgctgtgtcaatgaccgtcgcaataaaccaaacgggataaaccacgcaatgttcccgtagaagttataccaataatcaatctgggcgggcgcttgccgtaacttgaaagtctcaacaaacggtgtcaaattaatttggctaagtggtcgttgcaaatggagctgcatttgccacggataataaatatgccgtaaaaccgttaatgagaccaataaggcaatataaaacacaaataacaatagtttcagttctgggagaagctgtattttgcgtcgtttcattaataagtaccctaaccggcacacaataaaaaccaaacaatacaaaatcgtcttatctaaactctccaccgtcaatttgatgagtggtaaatgattatactgttccccccaagggaggatccattgttcataaatacgcccaagaaataccaaaaaaccaacctcacttattccactaatttaacctatctgttcattattcaatgagtaattaagtccattatagctgttttttttcaataaataacgcttaattactcgactaaagtgaatcttaaactattaggtatcgactgcccaactttagcccgatgtgtgcctactgtgctatgctataatagaaattactataacttgaaacaggagccttttatgaaagttctattatattttgaaagtgaaaaactactcgctaaatctggaattgggcgggcgttggatcatcaaaaacgcgcgttaaccgaaatggggattgactatacgcttgatccgaatgatcaagattacgatatcttacatatcaatacatacggactcaaaagccgcagtgtcatcaaaaaggcgcgtaaaatggggaaacccgtcatttatcatgcacattcgaccgaagaagattttcgcaactcctttgttggttccaatcaactcgctccatttgttaaacggtacctcgttagcctctatcaacaagccgaccacttaattacccccaccccttattcaaaatcattattggaaagctatggtctaaccaaccctatcgctcccatttcaaacggcattgatttagctaagtatcaagccacaccagctaaagaagctgcttttcggaatttcttccatttaaagcctgatcaaaaagtgattatctgcgtcggcctcttctttaaacgcaaagggattctcgattttgtcgaaatcgccaaaggtctacccgaatacacctttatctggtttggagatgtacccatgtacagtattccagccaatattcgccggattgtcaaacaggatcatcccgacaacgtcatcttccctggttatatcaaaggcgatattatcgaaggtgcgtatgccaatgctgacttatttttcttcccttcttatgaagagactgaagggattgtcgtcttagaagcccttgcaagtcatcaaaaagtattggtgcgcgatattccggtttaccatggctggcttgccgatcaacaaaactgctacatgggccacactaacgcagaattcagtcaactcatccaagcaatggtcactaatgccgttcccgatttaacagctcaaggctaccaaactgcgcagtctaagagtattacagaaatcggccatgaattacaagccgtttatcaacatgttttggcgccagatcaactgaatccaaagtacgatgccatcatgcggcccgcgaaacgttaagtttctgtttaaactttaaactgctatttgcgctaatgccgccctcgggttaaaataaggcattagcgctcttttagttctgttttttgaaaggatgtcacattatttgaaactcacaaaaattaaatcattcctatccacgagattaggcttcatgagtttgttagtctttttattttggctaaaaacgttattcgggtacttcaccgattttaacctcgcagctagtggcttcttacaaattgctattttaatctttaatccggtcgcgacgacgctccttttattcggcatcattctttatgttcgccagccgcatctcagttattggttgggcttgattatctatgccgccaacaccgctcttttatattttaatgtcatctattaccggcaattcaccgattacatgaccatcaacaccatcttagggtattcaaaagtttcggctgggctcagcaaaagttcactggccctcatgaactggcatgatgcgctgtattggattgatattattgtcttagccttgctgattttaaccaaggtcatcaagatcgacaaacacgcatttaatcggtggtgggccttcagtattacctcattggccgtcttattatttggcatcaaccttggcttaagtgaaatcagccgacctcaaattttatcacggacgtttgatcggaactacatcgttaagtacctcggcatcgacaccttcaccgtctacgatgctttcaagactactcagaataatcaagtgcgtgcccaagctgagagttacgacttagatccggtgctcgactttatgaaagagcattacgctgcaccgaacgctgaatacgcaggcgttgcgaagggcaagaacgtcattgtcattcatttagagagttttcaacaattcctaatcgactttaagttcgaaggccgcgaagtaacgccatttttaaatagcctctatcatgatcaaaatacattaggttttgaaaacttcttccatcaagttggccaaggtaaaaccagtgatgccgaaaacatgatggaaaccggcgtctacggtctaccacaaggctcagtctttacaacgcttggttcggataacaccttccaagctgccccatcaatcctcaagcaaaacggtgactatacgagtgccgttttccatggtaatgtgggcaccttctggaaccgcaataacgtctacaagaactttggctacaactacttcttcgattcttcctactttaacaccgatcctgataacgtcttacaatacggcttgaaggacaaattattattcggtgaatcgattaagtatctcgaacagctacaacagccgttctacacgaaattcatcaccgtcaccaaccattttccattcccattacccgaaaaagacggtgacttcccccgtgccacaactgataatacagcggtcaacaactattttgcgaccgcccattatcttgaccaatccctagaagagttcttcaattatcttaaagcctctgggctctatgataattcaatgattgtcctctatggtgatcactacggtctttcgaattctgataataaggccttactcagtgtactaggccgcgacccagaaacgtggaccgactacgataacgcccaactacagcgtgtgccttacatgattcacatgaacggtttaaaaggcggtatccaaaaacaatatggtggcgaaatcgatgcgttaccaacaatgcttcacttactcgggattgataataaaaattacgtccaattcggcaccgatttattatcaccacaacatgatcaagtcgtggctttccgaaaccataactttgtcacccctgattacacagtactcgatggcaccatctacaataatcaggatgggacagaagtaactgaaccaacagctaggttgcaaaaacaagtcgctgcttggcagaaacaagtgaaccacgaattgagtttgtcggattcagttaacgaaaagaacctattacgtttctatacaccacaaagttttaaaccagtgaaccctgccgattataactatctgactggctatcaacagcttgtcgatattcaaaataaattaggggctaattcaaccagtttattctcgcaaaatggtgatcaatcgactgttgggctctttaaaaccgatgctccagaattagcgggtgatcaatcaagcctcacggaagtgccaaaatcaaaggccctgaaaaaagagtctgatgcaacaacaactagcgatacggaataatcgtcaaaaaaaaacgcaaggacaacatatattgtccttgcgtttttttgacgttagctaatcacctgcgattgaaaactattaaaaacggattcctgagtcgttgtcatgattacgataatttgaaactgcgctgctaccgctctgacatcatttaataattggcgagcatccgttggtggaagttcatctaagaaatgcttgaccaccacgagttgctggtggcttgctaaaccgcgaatcaattgaatccagaactgatcgactggcggtaattcggtgcccaataaactccgactgcgctttaaatgctgttcaatcaacatttttaacgttggtgcaagctgctttttaggaagcaacaagttatcccaaccggacataaagggtagaatcttaggcgcctcataatcaatgacatatgggggttcaggtgattcaaggctctgatgaatcatctccggttgactaaaatagacctgtccaagtgctaagggttgtttatttagcatttcaatcacgcctttctcattttcctaaagcgagtaacttggcaccaaccaataatgtagactggtgcaattagactgataaatggtgcccatagttgggcgaatacttgattggttaaattctgcttggtgctctcatgcaaaatcggattcaataacgaatgactactaaagtcagtcagatgatttttaaataacggttgaaatgctcggggaccttgtattggtcgcaacggcttttgtagccactgttgattaatcagctctaatccgcgccaatagtaggaattgactaataaccaacctaaaatcactgtcacgcttgcgctgattagtaagcaaagcgccgttaacgtataataattgacaattgtatgtcgcgaccaattcgcactagtgaaagtatcgatatcctgacgcatcttcttaaacgcttgccaagtcaaaataccaatcacaagtgcgataacgatagtcagcactaccgcgataaattgatagcgtcccagtaagacttctttactttgaaccagatgtgtcagggggttagtcccctctttagttgtgttaaagttggctaattgctttttcaactggttgaggtcatgtcgttctaaactgatcaagctcagcgcaatcagcatgacgcctaaaaagaggcaatccacgagatagattaacaaagattggcgtaaataataccgaatattagctggaattgatttaatgaagaacatgacccacctcctaataaagatagtgtaaaactaaagtatgaaaattatatgaactctgtggtaaaaattaaaaaaaacgccttaattaagacgtttttttagttcccttaaattgtcttttcttttctttgaatcattaaccaataaacaagtgctgtcagccccattgcgataaacgttgcccccgtataagcgtgaataatcgcgaattgatttaagaccaagtagctgaccaccccaatgacccatgcaatcatggctgtcagatgatatcctttggtgtaccagtatggtccagcaacttcattgagcgcaccaacattgtagtgccaccgtctaataatgaagtaatccaccaagaaaactgcgatttcaggtcctaagaacatcccaatactatcaaggaaggtttcgaaagtggttaaaaatgaggcaacatagaccgggataaaggtcatcaccgttgccaataacgtcacgacccacaatgccggcgttaatttaaatttcggaaaaatattggttaaagccgatcccgcagccattagattcaccgcattagctgtcgtactggtaatcacgatcactaataacgctaaaacacctaaccctaatttggccgcaatggtgcttggatccgcgttgttcgggtcaaaatgatttaacgtaatcgctgtggcaattgtcgccgttaacccgatgaaagcaaaccagaacaggccaatattggcgcctaagaatgaatagcctgtggctgctttcttgttctttgaaaaacgactgaagtccgcagcagcggttacccatgcaaggttaaacgctgctaggatatcgaccgccttcccaaattcaagccgtaagttgctggctggtcgccacgccaataagtctttgaacggtaccattttgaagacaatgattgattcccaagtgactaagataatcactaagatgatgccaattcgttcaatccagcggacggatttttcaccgagcgaaatactgattaaatgcaggacagacataattagaatcccaacaatcaagctcatccggttagtggctgcatcgttgcctgaccagcccatgatttccttgatgatgaagctcactgaagttgctgcaatatacgtattcaccgcagcccaaccgatgaattgtaccacattgataatcgatggcaagacggatcccttcacgccaaatgaggcccgcgttagccccatcgcccccacaccagtttgataccccatgtaggaggccagtgcaagcaagacgtacgataaacagccaacaactagtaacaacgtagacccttgaatcaagccagttgccgcaataatgccgccgataaaccaagtgccgttattcgcatttgcaccaatccaagttgcgaacaaatcccaactgcccatcgttcgtgcgtccttggatactgcatgaattgtttgttgctttgtcattttgataccctccacttggttaattgcattaaaaaaagacctactcctagacagagcaggtccactaatgtacttgttaaccgctcctttgtcagcctcactggactgcccttaaaaggatttatatttataagcattgtattaaacttacttgccaaagtcaactcatgattgttatactcactaataaaaaaagcgaggttggataaaatgctcattcaaaacgtgcacattgagaatcaagaatcattgcagtcaatcagaattgaaaacgggatcattacagcaattgaggcacagctaataccgcatcctaatgagcaagtcatcgacggacatggtcaattggcattaccgccatttgttgatcctcacgtccatctcgattcaactctcaccgccggccagcctgaatggaatgaatctggaaccttgtttgatggcattcggatttggtccgaacgcaaaaaggatttaacccacgacgacgtcaaacaccgcgcaattcaagcactaaaattacaggccagccatgggattcaattcgtccgctcacacgttgacgtgactgatccagacttagttgcgctcaaagccttaatcgaggttcgcgaagaagtcaaggattggatgacgttgcaactggtagcctttcctcaagaagggattctttcttttccaaatggcaaagcattaatgaccaaagctgcccaattaggggttgatgcaatcggtgctattccacatttcgaatttaatcgcgaatatgccgtcgaatccttgaagtttgcttttgaactcgctcaagaatatgatttactattcgacgcacataccgatgaaattgatgatcccaattcacgtagtcttgaaacagtcgcgactctcgcccttgaaacggggatgaaagacaaagtgacggcttcacacacaactgccatgggctgttacaacgatgcctatatgtacaaattgatgcggctgttaaaaatggcggatttaaacttcatcgccaacccacttgtcaacctatttctcggtggccgttttgacacttatccgaagcgccgtggtttgacgcgcgtaaaagaactgactgccaacgggctaaacgtcgcttttggtgaagatgatattcaagatccatggtacccaatgggcgatggcaacatgcttgatgtgttgtatagtggcctactggcaacccaaatcatgggccatactgaaatcatgaatgcctatcgcttcattacttacaatggtgctcgtgcaatgcacgtccttgaccaatatggtctcgaagtgggtaaacccgcccacctgattctaatggatagcgacaacttctacgaggctctcaacaagcgcgccgctgttaccctctcaatgcacgctggcgaaatcatcagtgaaacccaaccagctcaaacgcaattgcatatttaatctaaaaaataggcgtcacgacaatttaatccttgtcgtgacgcctatttaaattggtttagctttcacttgtcacaatcgtttcatctgggaaagttaaggtaaaagtggtcccttgttcaggaatactttggacctcaatcgtcccataatgtaactggacgagttggtggacaatcgccaaccctaaaccagattcaccatatttggtattcttacgtgatggatctgctttgtaataccgttcccaaatatttttgacttgttcgtccgtcattccgataccggtatcgctaatcgttaagattgtttcgtggaaaccagcttccgcagtcaccgtaatttgcccattttctgtaaactgaatggcattttgcatgatgttaaacatcacttggacaaaacggtcatagtcggcatagattgggacattctcttgggcgtccaagatgagcgtatcaccggcttcagtcgccttcttctcgagttgctcttgaatattctggatagcttccaccgcattaaacgtttgcgggttcaatttaatttggttagtccgaatcttttcataatccaggttctcgttgactaagcgaatgagtcggttggtttcattttgcattaatgaaatactcttggcgcgcatctcttctggaatcgcatcatattgcaacccttctaacagacccttaacggtcgttaaaggcgtccgcatttcgtgagcagcgtcggccatgaattgccgccggcgatcttcttgccgcttaatttcctcttcagattcattcaacgaatgcaccatctcattaaaatcggtggccaaatcatccaattcatctttaccaggattcttaatctgaacattaaaatctccttcagcaactaggtgggtcgcatttcgtaagcgattaatccgataaatttgataccgtgctaagacgtaactcaacagaatcccaccgattgtcgatagtaaaaaggcaatcaagaggttcttgcgcatcgttgtcaaaccagatttaacggtttgtagtggtgctgccaccccaatcacgtaaatcagtttgttattgtaaaaaacgggtttgaagaccactaactgttcttgcttattgttattcacttggtgcgaatcacgacttaagctcagccgttgaatctggccattctttaaatgtttccaatattgtttcttgaccgaaactttaggatccggggtaggatacaccatctcgttttcggcgttaaagaaattaaacccaacgtgttgttgggaaaggatttgttgactatcaataatgaattgggtcgacaaggccgcttgagacccctgtttgaaagcttcacgttcaatcacatccgcgtaaccttctagttgatcccaggtgctctcataagcggtccttgtcgaatattgcgtaaacgcaatccccacaataataatggtcgtcataatgacgccgaaaaatgccaacatccattgataaataagcttcattcgcgcgctgcgtctgaatcatcaaatttataaccgacaccccaaacggtctgaatcacttgtggtcctactttttcaatcttttgacgtaacttcttgatatgcgcatcaactgttcgttcgtcaccgaagtattggtaatcccacacaagttctaataattgttcccgtgagaaaacttgacggggatttttagctaacgtcttcaataaatcgaattcttttggcgttaaatctaaaattggtttgtccaataaataagtctcacgcgttttagaactcaacttaaagtgtgttgtttgtacatcaaaatctgaattttcagccgcttgttgtaagttttcttcagctgcttcgacttgttcatcaatcaactcagcacggcgatgtaaggctttaatccgtgcaatcagtgtgattggactaaagggttttgtcacataatcatcagcaccgagttcaaggccaagcacttgatcactttcagaatcgcgcgccgtcaacataataattggtactgtcttcgacaactcgcggattttttgggcgacttgcattccgtctaaacccggtaaatttaaatcaagcgtgataatgtcccaactctctggatcgacactaaaggcttccactgcttcattgccgtcgtaagcgaaatgggcatcccaagcttctttttggaaaaacatactcatcatttctgatacggatttgttatcttctaccattaaaattttcattagaattccttctctttttacgttgctatgtctatattatacagtagataaaccaattacggatgaataatatatgaagaagtgatgaaaatcaaacgcatcacggttcccgtttgcatggtatcgctaagcatgatagcatgttaagcagatatcattatttaggaggccccattttgacttataaaggactagtatttttcgaccttgacggtacactttacaacgaacattctgaagtagatgcagctgttgcgattgcactccaccaattacgcgccaacaactacctaccaatcattgcgaccggtcgctcaccgcttgaaattcaagatgcacttgcaaaaaccggcatcgattcattcatttgtttaaatgggagcttcattcaatatgaaggtcaacctgtttataaaggcactattccaacgcccgtgattgaaaaaaccgtcgcaattgctaatgctgctgacgaagccatcgctttttataatgaagaagcaatccggattacggctgtaactcaacccggcaaagatgcctacaagtttgtcaacgcccccgtccccgaagttgatccagactattacttgaatcatccagtctacatgatgttgattctaacaaacgacaatgacaaggcctatacagaaacactaagtaccgacttaacattctaccgcaacacaccgaactcaattgatacggttgaaaaagattgttcaaaacaaaccggtattaaagaattgattcgctcacaaaacttaacggacatcccaacttatgcgtttggcgatggtacaaacgacttaccaatgctcgacttcgtagactatcccaccgttatgggcaatggtattccggaagctaaagccaaggctaaatacattacttctaagaatactgaaggtggcattattgaaggtttacgccactggggcttaatttaatcacttaactaatccgcgccatgacggctcaatcactgtcatggcgctttttttatcttgacacttctcagtagaccgattaaaattagaaccatctcacttaaaaaggagttactaatgacacaacattcactctttgccaaaaaacaaatcgacgtgaaccaatttaaaaacagtacactagaacgccatttaaccgcctttggtttaaccgccatgggggttggtgcagtcgtcggcgccggtatttttatcacaccagggattatcgccgctaaatatgctggacccggtgcgatgctgtcttacctgctcgccgcagtcgtctgtgcaatggctgccctttgttattcagaattcgcttctacaattcccttggccggtagtgcctacacatacgtctacaccgtcttcggtgaattaatcgcgtggattctaggttgggcacttatttccgaatatctcttcgcagtcgcctcagtggccgtcagttggtcagcctacttccaaaatctaattgctggctttggattacacttacctaccttcttatcgactgcatggacgcctggccaccctggtggtattaatttaattgccggtttaattacgttattgattgggttcttactatcaaatggcttacgcgaatcaacacggattaatacgattatggttggtgtgaaagtcgctgtcatcgtaattttccttggcgttgccattttctatgtgaaaccagccaacttcaaaccgttcttaccatttggtgctggtggcattctttctggggcagcattagcattttacgcctacatcggctttgatgccgtttcaaccgcatcagaagaagttgtcaatccgcaacgtgatatgccaatcgggattatcgcttcattattgattgcttcattattgtatgccgcagttgccaccgtcctcgttggcgtcgtgcactatacaaaactcaacgttggtgaccccgttgcttttgcgcttcaattgatgcatcaaaactgggttgctgggattgttgccctgggagcagttgccggtatgacaactgtcctactcgttatgacctacggcggaacacgtctgatcttcgccattagtcgcgatgggctattgccacccgtttttgccaaagtcagttcaaaaacacatgtgccagttgcgaatacatggattttcgccatcgtcacaagcatcgtcgcaatggtagtgccacttgataagattgctgaattggtcaacattggcacgttattcgcctttgcaactgtttctctcggtgtgatcttcctgcgcaagttaccattttataatgaattgccacaagggtttaaagtgccactattcccatggattcctttactttcatgcggcttatgcttactactcatgacccagttacaactaacaacttggattgtcttcttaatctggttggtgattggcctaacaatttacttcagttacggctaccgtcacagtcgccaataaaaaataggcgttaagcagttttcataatctgcttaacgcctatttctatgcaatctatcgtgaactatctacaaaaatgcatgaacatccgtgaaaatgaggtcatgttgccagcaagaatcgcgacaattggcactaatgcccacaaccagtacttattattcttccgctgttcaacctcagctttcaaccgtaaattctcatttggtagattgcaaatttaatccgaatttttggacaaatttgtcagcataacctgatacggtgtttgccagtcgagtattttaagcggtcgctggttaatttggagtaacgtcgtcgttaaatcttgagcactaatgtgctcaaaacgagtccctttaggataaaaataacgtaaattccgattaaagcgttcattactaccacgttcagctggcgtataagcatggcagtaataggtcttaataccatattgtgattcaagtgatactagcccactaaactcagtgccacggtccacagtaaagctgtgcaccggaccattaaaagtggttaggaacttagttagtgcttcattaacagtcgctgtcgtccgatcttttaaccggtatgcccaaaggaaccgtgatttgcgatcgattaaagttaataaaactgccttactatgcccacgaggaccaacgactgtatctagttcaaaatcgccgatgcgcttacgttgattaatcatcatgggacgctgttcaattgatcgccccaaagattgattatatttggatcgttggtcaacgttacgccgttggcgtacgccatgttcaggtagatcattcaaggagaaaccaattctcccctgatttagccaattataaatagatttagtagctagtttaaattcgtgagcaatcattcctggtgaccagcttagacgtaaatggttgagaattttttgctttaactcatcgctcagcttagttttccgaccacatcgtgatcgcttgtattcggcatctgtttgtgctaattcagcctgataaggttgacatcgagataattcataagaaattgttgacggtgatcggttcagccgaacgcccatttggatattggacagccctagttcacaaaaggtttcgattttaattcgttcggaataggttatactagacaaaagatcagctcctaaaagatgggtttgtggtaaacaccattttaaaggaagctgatcttttttgtccgaacagcgttcggattaattttacaatctaccattttccatcttaaggcgtgcaatttcgagttctaatttgtctttgtcatccatgaaactcaccttccgtcctaatttattaccgccattataacagaatttttcaaaaatctcccacctatccactccaacaaaaaaagcccctctaatcttgtggattagaggggctttaacgtgctcttggttgcaacaacttccgcttaatctaaaataggcagtcatcccaaatttcgggataactacctatttggtattaatgctcaaaagttgatcagcttgaacgcacttctatttttaacgtgcttttcaaaccatacttctgcggctagctacgtcccgcaaacgatcgactccgtcgcccattcacgaaactaggctagtcctcaaagtataaccggcttgaacgcacttctatttttaacgtgcttttcaaaccatacttctgcggctagctacgtcccgcaaacgatcgactccgtcgctcattcacgaaactaggctagtcctcaaagtataaccggcttgaacgcacttctatttttaacgtgctttcaaaagcatcctattccggttagctacacatgcttacagcaatcattcgccctgttaggctaatcctcacaggataaccacttttgacgcacttctattttttgtgtttcttgttcagaatcttgtcgaacaagttgttgtcttgtgggttaagtgagtcaccacttgcgactgcaaatgcttttagcgcatcacgttgtttactgttgagggtctttggtgtcacgatgttaactgtaacgttttgatccccattacctgtcccgtggagcttaggcgcacccttaccacgtagacggaagacggtattcgtttgagtccccgctggcacttttagtttaacaggaccatggactgtgttgacttcaatttcatcccctagagcagcttggacaaagctaattgggacttctgaataaatttgtgcgccatcgcgcttgaattcagcacttggtgccacgcggaagacgatgaataaatcgccataagggccaccgtttgtgccggcttcaccttggccttgaagacgcatttgttgaccatcttcaacacctgctggcactttaaccttaacagtatgccgttcatcttcgtgacctgttccatgacatgtttcacacttgtctttaatttctttaccagtcccgccacagacatcacagacttcttgagccatcatgcggccgaaagctgtttgtcgttcaacttggacttgacctgcaccgtgacatttgtgacacgtttgggcgcttgttcctggtttagcaccagagccatgacacgtgtgacattctgattcacggttataagaaatcttggtttctttgccgaaaatggcttcatcgaacttcaaatccatccgatattgtaaatctgaaccttgacgaggagcgtttggttgttgccgagcaccgccgccaccgaagaatgaactaaagatatcttcgaaaccgccgaagccttcagcaccaccaaagccgccaccgaagccttggcctgcgccgccgccgaaaccaccgttcatgccagcatgaccgtattggtcataagctgcccgtttttgtgggtcacttaatgcttcatacgcttctgtgacttccttgaacttggcttctgcatctggggctttgttaatatctggatggtacttctttgaaagtttacgataggcctttttaatctcatcatctgaggcgtctttacttatccctaagacgtcatagtaatctcttttatcagccattgtgggcctccattcatatacttacgcgttaaatctatcttatcaaggatagcataattgactgattaaaaaaagccaaggccctagaccatactaggttttggctttttttaaaacgcattattatttgtcgtctttaacttcttcgaagtcgccgtcaacagtaccatcgtcagacttaccgtcagttgcattaccttcagcaccagcagcttgttgtgcttcttgcgcttgttgatataacttaactgttaattcttgaacgatttcactcaacgcatcgcgttttgtcttcatgtcttcaaagttgttttcttgttgtgctttgactaattcttctttagcatctttagccttttgtaattcttcgtcagaaactttaccttcaagttctttcaaagtcttatctgtttggaagattaattgatcaacatcgttcttcaaatcaacttcttctttacgtttgttgtcggcttcttcattttcttgagcttctttcatcatccgatcgatttcttcgtctgataaaccagagttactcttgatagtgattttttgttctttgtttgtgccaaggtctttagcagaaacattaacaatcccgttcttatcaatatcgaatttaacttcgatttgtggcacaccacgaggtgcagcaggaatatctgttaattggaaacggcctaaagtcttgttatcagcagccattggacgttcaccttgtaagacatggatgtctacggcaggttggttgtcggcagctgttgagaatgtttgggctttgcttgtaggaattgttgtgttccggtcgattaacttcgtgaagacaccgcccattgtttcaatccctaatgataatggtgtcacatcaagtaaaacaacgtctttaacgtcacctgagataacgccaccttgaacagcagcaccaagagcaacagcttcgtcagggttgattgagtgatcaggttccttgcctgtccagttcttaacagcttcttgaacagcaggaattcgtgttgaaccaccgtttaagatgactttgtcgatgtcgcctgattctagaccagcatctttcaaagcgttcataacaggtgcttttgtccggtcaactaagtctgatgttaacttatcgaattcagcacgtgataaagtcatttccaaatgtaaaggaccgttttcgccggctgagataaatggcaagctgatttgggtgcttgtcacaccagataaatcttttttagctttttcagcagcatcttttagacgttgcatagccatcttgtcttttgacaagtcgataccgttgtctgatttgaagttttcaactaaccagttcatgatggcttcatcaaagtcatccccacctaaatgtgtatcaccgtttgttgataatacttggaagacaccgtcgcctaattcaagaacagaaacgtcgaaagtcccaccaccaaggtcataaactaagactttttcgtctgtttctgtcttgtccaaaccgtaagctaatgctgaagctgttggttcgttgataatccgtttaacatctaagccggcaatcttaccagcatctttagtggcttggcgttgtgaatcattgaagtaagcaggtactgtgataacagcttctgtgacttcttcaccaagataatcttcagcgaatttcttgatgtattgtaagatcattgctgaaacttcttgtggtgtatatgatttgtcgccaacagttactttgtaacctgcttcgccgatgtgacgtttgattgatgcgattgtatcagggttagtgattgcttggcgttttgccacttcaccaacttggatttcgccgtttttaaatgacacaacagatggtgttgtccgtgcgccttctggatttgtgataatttttggttgtccgccttctaatacggcaacagctgagttggttgtccctaagtcaataccgattactttactcataaaaaataccctctttttttagatttttagtttaatttattgtgcaacaacgaccattgctggtcttaagacgcggtccttcaagtagtagcctttttggaagacttgtacaacagtatccgctttttgatcaccatcaacagcgaccgtttgcacggcctgatgaatggtcggatcaaaggcttgtccttgcgcctcaatttccttaacgccatgatcttctaaagcatgtttcatatgatcgtatgtcatttgaacaccctttttaagactctcagcactatcatcagttgcttcagttgccaacgcacgttctagattatccaaaacgggtaagacatcttttgcaagtgattgcccatcatattttaacaagctagcttgttctttttgatgacgggtttgaatgtttttaatttcagcttgtgaccgtaagaaactatcttctaaatcatcatatttcttttggagttcagcaagttgagccgctaaatctggcttagctgcatcttcgtcaggtgcagcatcttcgatcacttcatctgcttctaattcaggttcaaatggcgtttcttctttaggtgtttctgtttctggcatttctgctgctggcttttcttgtttctcagccttttcttgcttggtcaaacaaacacgctccttttaagattgatcatcatcgaaattcgcataataatcaattaatttcttcgctaactcttcacggaataaatcgagtaacccaatcatccgcgaatagggcatgctagtggggcccagtagtgcaatgactccctgtccgtgttcaccaacgtcataattaacagtcattagactataatgtttcaacagatcgttggccatctcggtgcccaggcgaacctgaacttggctattggcgcctccaggggacaaatctagcaacttggctaaatcatctgaacgattaatcatgttatacaacgacttcagctgggtgacatcggagaactctgaaaaattcaacaagttcatctgaccgccaacaaataagcgctcttgactcgcctttttcaaaacatcgtcgaagatgtctaaaaagccggtcggagaagccatgtactgggctaatagcgccggtacatccgtctttaacttctgactaaccacggttaacggtaagccaattaggtgatcattaatgattcgaatggctttttcgagttcatcacccgaaatcgcttgtggaatggtaaatacctgattatcaactgtccctgcactcgtcacgataatcgccatcacttggtgattactcaacggtactagacgaaaaccagttaaccgaatctcagccacttccggtcctaacgcgattgctgtatagctcgttaggttcgataagatattagccgattgtgagacgatttcatcaatcttatgatagtgctgtccaaatgattgttggaccgttgccacatcaaccggattgagggttgctggttgcatgagatggtctagatagtagcgatagccttgcatcgacggtacccgtccagatgacgaatgcgtcttctcaattaaaccgacactttccaaatcagccatatcattacgaattgttgcagaactaacgtgtaccggcaattctgccattaacttcttagaacccactggctgaccactctctgtaaaaagacgaataatttctttcaaaatcattaattgcctttcggtcagcatgtcatcacctctttttagcacttgaatatcatgagtgctaattacaattattaatatagcaagaacgtcaaataaagtcaagaaacgtaccggcttttttacggatttactgaaaatcggtccttagacggagggccttactggaccaaaggacaaaataaaaaacgagccgcttcttagatggaagagactcgctttatgaagtggaatatttataacgtgcttttcaaaccatattcctgtgcctagcgacacaaggcgaatgctcagaatatcccccggtttgaacgcactcaataactatctagcagaaactcttggaagacttcattgcctaagaacttacctgattcagttagtcttaaccaatcgccttcttgtttgaggtagccctttacaatttgggtggcaactgtttcgccgtaaacattttgtaatggataattgaatttatcttgaaaatgactgatggatacgccttgcatcgtccgtaacccgaggaagagttcttcctccatttgttcggtcagtggcagaacatggcgttcaatgactggcaccttattttcttttaagggttctaagtattgttggattgggccgaagttatggtaacgatccttacctaaatagccgtaagcaccggcaccaaagccaaaatacttttcattgcgccagtaagttagattatgcgcagattgaaagcctggcttggcaaaattactgatttcatattgatctaagccagcccgcttgaaactatcaatcgcggcttgatacatatgtgcttcaacatcttgcgatggtaaatgcaacttgccttggcgcatcaagttatagaagattgttttgcgttcgagaatcaatgagtacgtcgaataatgcggtaagtcgagttcaattgccttattcaaactatccatgaaatccgcttcactttgttgtggtaagcggaaaatcaaatcgatactcatattttcgaagccgaccttgcgcgcgttatcgattgcccgataaacatccgcacttcggtgaatccgcccgatctgttttaaaatctgatcattaaacgactgcacgccaatacttaaccggttgacgccgttgtccttcagaacttgcaatttttcagtatcttgtaagtcattaggattggcttcaaacgtaaactcaccaccctcataaggtaagtattgatgaatcccatcggttaaacgttggagttgtgctggtgataaagtagttggtgtccccccaccgacatagatcgtatcaattggttcgtctgggtattctgccatcactaattgaaactcgcgaatcaacatatcgacataatcatcgaccggttgaccttcaatgaaaaccttattgaaatcgcagtagtaacaaatatgctcgcaaaatgggatgtgaatataagcgcctgccattaatgttgtgcctctaatttctcaaaataagttcgggtatcggcttcgtcttggtggagttggtcaatcaaggcttccgcggagtcaaacttcacttcgccgcgtaagtagtgataccaatccactttcacttgttcaccgtaaatatcgccattgaaatctaataagttaatctccaccgttaccgggttattgctgtggaacgtcacattccgaccaattgaagccatgccaatataccattgaccgcgcactaaaaagcggaccgcataaatcccaattcctggtaatcgttctggtcgttgcgattcgatgttagcagttggaaaccctaattctcgcccgcgtgcttcaccatgcactacttcaccggtcgtttggtaaacataaccgagtaattcattagcttccgcaatcttaccagcatctaaatcctctcgtactaatgtcgagccgattttgacaccattatggtcatgttctgcaactgtcacaatggcaaagcgccctttggcatagtctgacaatgtcgtcatattcgcaatctcttttttaccataagtgtaatcaaagccagccaccactgtatccgcatgtaaagcgactaagtattgatcgacaaatgtttgtggggctagttgtgcaaatgcttcattaaagtgcacgatgtagaaaacatcaacgcctaactccgccatcaattcttgcttgcgctcaaccgttgataaataacggaatgactcccgatcggcattgcgataaacaatggcaggatggatatcaaacgtcatcacagctaatagtaaacctttttgaactgcaatttgttttgctttccgaattacagcttgatggcctcgatgtacgccatcaaaaaagccaagcgccaagaccacttggtcagctggcacttgttcttttgaatatggatgaattaattcaatgacacgcatatttttcacctagttttttttaatgagtcccttgattttgtaaatacattttataagggcgataaagatgttgcgctgctttttcaacttgatagagcgccttgatatgcccttgataggtcaacgccacaatctcatcggtttgttctggcaatgtcaagaacacaccgtttaaaagcttggcccattgatcgtcgtctaaagcaatcttcttgtaatcttcaaatacatggtcaattggcaataaaacgtctgccagttcgcccgcttcagctttttgcgccaattgttccaacgtgatacagttaccaatttgaatgccgccactcttaagacgtgtcaaatcggacatcactgcgggtaaaccgagtttacgaccgaaatcaacagctaatgtgcggatataagtcccctttgagcaaccgacaatgaaccggaatgtttggcgcccagattctgcgtcaaattgtggttcaccatccaaatcaaactgcgtaatcgtgattgaacgttgtggccgttcgactggatcaccagtgcgcgcatagtcgtataaacgccgcccattgactttcaccgctgaaaacatggggggaatctgaattgaatcgcccagaaaactagcgagggtctctttgattctctcagttgaaaaaggttctgttaagcgcgcctcttcaacgacttcaccatctaagtcttcagtcgttgttgataagccaagggtgatttcacccgtgtagactttaccagaatgcaccaattgatcaacaaccttcgttgcttgaccgatacagattggtaacaccccatcgacgttgggatccaacgtgccagaatggcccactttcttcatgtgtaaaatgcggcgcactttaaacacacaatcgttactcgtcatgccgcgttctttatataagggtacaatgccgtccataagtaatctcctttaagtattaactaaactattatagcatagagtgtgaagtcgaacgggattagctttatgatgctgctcaatttattatcaaagcacaaaaaaagatgggacaaaagaaactcttgcccatcctcgctcaatgttgttttatggtagattgcaaatttaatccgaattttcggacaaatttgtcagcataacctgatacggtgtttgccagtcgagtattttaagcggtcgctggttaatttggagtaacgtcgtcgttaaatcttgagcactaatgtgctcaaaacgagtccctttaggataaaaataacgtaaattccgattaaagcgttcattactaccacgttcagctggcgtataagcatggcagtaataggtcttaataccatattgtgattcaagtgatactagcccactaaactcagtgccacggtccacagtaaagctgtgcaccggaccattaaaagtggttagaaacttagttagtgcttcattaacagtcgctgtcgtccgatcttttaaccggtatgcccaaaggaaccgtgatttgcgatcgattaaagttaataaaactgccttactatgcccacgaggaccaacgactgtatctagttcaaaatcgccgatgcgcttacgttgattaatcatcatgggacgctgttcaattgatcgccccaaagattgattatatttggatcgttggtcaacgttacgccgttggcgtacgccatgttcaggtagatcattcaaggagaaaccaattctcccctgatttagccaattataaatagatttagtagctagtttaaattcgtgagcaatcattcctggtgaccagcttagacgtaaatggttgagaattttttgctttaactcatcgctcagcttagttttccgaccacatcgtgatcgcttgtattcggcatctgtttgtgctaattcagcctgataaggttgacatcgagataattcataagaaattgttgacggtgatcggttcagccgaacgcccatttggatattggacagccctaattcacaaaaggtttcgattttaattcgttcggaataggttatactagacaaaagatcagctcctaaaagatgggtttgtggtaaacaccattttaaaggaagctgatcttttttgtccgaacagcgttcggattaattttacaatctaccttattagtaaccttttttactcagaaaaagtgagtcctttattttgaaaccgactatcgatcctagcactttttaattcgatcgcaaaaataatctctttttcctattcttctttggataaactctcaacatagcctggtacttgtttttgataggcctctgctatatcactaaaacgatactgagttcggtataccttgagccggttactcgtgattcacaattcttcactagtcggtagcgtaaaaattgcggctcgccccaaatcgagttcactgactttcggcgcttcggggtcggtgccaaaataccagacattcggtatcccatcaagcgtgacaaaattaatctgtcgactagccggttgtcccaggttgttcgctgtactcagcaccattgtattaaactgcttaacatatttacgaaactcgcttaagttattttgatacagctctgaactaaccggctgactatcaatataagcaatcgcatcatcaatcgtttctaatgccgggttagcctctaaataataaagaatctgtggaataatgtgggatatttctcgttgataataataaaactgaaaccagcgattagatactgataaggcctctgtataacgcttaacaattcgccgccgatagcgttggacgatatattttaacggtcgatatttaatcaacttttgaaagaatagtaatatggtgcaaacgactaagttaatttaataggttatcgcttccataaggtcattcaaacaaaaaaagagccccgctttcgcgggactctttttcacagtttaacgctgtgcttcatcttcgtgtaacttacgtaaaagttcgtcgatatgttcaccataacgcactgaaccgtcttgttcaaaggtgatttctggaatcttgtacaacttaatccgttggccaagttcgctgcgaatcaatcctttagctttatctaagccagcttgtgtcttttcagcgtcacttgctaagccagataaaatgctgtaataaactttaacatgttgtaagtcaccactgagattaatatcagtgattgtgaccccttcaactcggggatcacgcactctttttaataaaatgtcatttatttcgcgttgaatttcttgttcaacccgaccaacacgatgtttcattgcttgtcctcctgtaaattaattatttaacaggtacttcttccatcacgtaggcttcaatttgatcatcaatcttaatatcattgtaatcttcgattgtcacaccacattcaaagccagttttgacttctttaacgtcatctttgaaacgtttcaagcttgaaagtttaccttcataaatcacgataccgtcacgaattaagcggacaccactatcacgttggataacgccagtgtcaacgatacaaccggcaattgtcccgatcttagaaacattgtatgtttcacgaacagttaattgacccgttactttttcttcgtaaactggttctaacatacccttcatagcagcttcgatttcttcgattgccttgtagatgattcggtgtaaacgaatatcaacttgttcagcatcggcttgaatcttagcttgtggtgttgggcgaacattgaacccgatgatgatggcgttacttgcagcagctaatgtgacgtcactttcgttaatcgcaccaacggcttcatgaataatattcacgcgcacgccttcgacttcaatcttccgtaaactaccagccaaggcttctgttgaaccttgtacgtcggctttgataataacgccaacttcttttaattcgccttgtttcattgtttcgaacaagttatctaatgtgacagggtttgaacggctacgttccttcaagagcgcacgtttagcacgttcttcaccagcagcacgagctgttttttcgtcttcaaagacaacgaaacgatcagctgcttgtggcacatcattcaacccagtaatttcaactggttctgatgggaagacttccttcacacgacgaccgcgatcatttgtcatgacacggacacgaccaaaggtattcccaacaacgattggatcaccaatcttcaatgtcccttgttggatcaagagtgatgcaacaggtcctttacccttatcaagacgggcttcgatcactgtcccaaccgctttttgatctgggttagccttcaattcaagcacgtcggcttcaagaagcaccatttcaagtaattcatcaatgttttcaccagtcttagctgagatcttaacaaagatggtatcgccaccccagtcttcaggaacaaggccgtaacccatcaattgttccatgacgtgatctgggtttgcgcctggtttatcaatcttattcaccgcaacgatgattggggctttagcagccttggcatggttgatggcttcgattgtttgtggcatcacaccgtcatcagcagcaacaactaagatgatgatatcagtgatatcagcaccacgcgcacgcatgttactgaaggccgcatgtccaggtgtatctaagaatgtgattaaacgatcgtttaacttcgtttggtaagcaccgatatgttgcgtaatcccaccggcttcaccatcagtcacgtgactgttacgtaagttatccaataaggttgtcttaccatgatcaacgtgacccatgattgtgacaactggtggacggctcacaaggttggcatcactcttagcttctgtttcaaatactgaatcgatatcagcaatatccacttccactttttgttctgcttcgatgccgtaatccgttgctaataattcgattgtatccttatcaagtgattggttcatgttaaccataatccctaacatgaataacttcttgataatttcagctggttcacggtgaatcttcttagcgatgtccgcaacgttcatgccttcagagtaaactaatacttctggtaatggccgttctttacgttgtggcatttccttcttagcagcattttgttcagctaattgttgcttacgggtcttcttacgtttcttattgaaacgttgttgattgttaccgtagctgttatacccgccgccacgtttcttatctggaccaaagttctttggcttgcttgctgtattgtttgatgctggtttagcagcactcaccgtattagcttgcattttttgttgcatttcttgtgccgaaactggccgactttggttcgagttgttattaggacggctgtttgtattgtttgctggacggccgttgttattgctgtttgcaggacgattatttgttgtcgttgggcgtgcgccggctggcttgttgccggctggacgactgctgttattaccgtttggtttagcagctggccgtgggcggttactttgttgacggcgtttcttttcgtctgcttcgcgttgttcacgttgttgttgaatgcgttcttgcgttctttgacgacgtgcattagcttgtgagatttgttcttgcaagctcaatggttggtttgacccagctggacgcgtattgccgtttgtccggttagccgcattattgttagggcgaccattattaggacgggcgttattgttgttaggacgaccattggcattgttgcggttttgaccatttgatgcttggccattccggttgccttgtgggcgttggttgtttgaacgaggtgctggtttgctgctagcttctggacgacgacggatagcggctttgttaatcttaatcttaccgttatctgttttttcgcttgcctttggtgcagcaggtgctgcggctggcttgctgtcagttgtcgttgcagctggttttgtttccttatggaagatggctctcaaagctttttcttgattgtcatcgatagttgccatgtgattttttagatcgtaaccttttttaacggcagtttctaaaagatctttgctggcaacgttaatttcttttgctaattcatagatacgttttttacccatatcttcacgctcctttattatcccagtagcgttatcatctttttggcaaacccggcatcaacaaccgcgatggtggctctatgtaatccaattgcttgggttagctgggccgcggtatacgcttttgtttccgggatttcgtagaaatgactcttatcagtcaatttcttctgtgtcagttggctaatgtctgagccgataaaaaccaatttcgctttttgctgctgaatggcttttaggacttgttcttcaccactgaccagttgccgtgctctcatgcaaatacctaagagttgtaataaacggtctggttgttcactcattttcgttctccaaataattctagccgagccttttgatgatcaacatattcgaataattctgtataaaatgattctgcaacgtcaatcccaaacgtcttttctaaaattttcttgctttgggcggtcttgattgcatcaggttctagtgaaacataagcgccacgacctgatttcttaccagttgggtcaatactaatctcaccttcggcagtctttacaatccgcaccatttcttttttaggcttcatttcttgcgaaataacgtcttttctcattggtacttttctttgtttcatcatgaacacctcacttattcttgtggttgttcttcagaatcaacagcagaatccgttgcttggtcttcgaagccttcaacagcttctgttgtttcttcttcaaaaccttcaacgactgcaccttcatcttgactatcgtcttcatcaacgaattcgacttcagattcaggtttgatgtcaatcttgtagcccgttagcttcgcagctaaccgtgcattttgaccttttttaccgattgccaatgacaattgataatcagggacgatgactgtacatgtatgttcgttatcaccgttaaattgaacagcgatgacttcggcaggattcaaggcattggcgatgtagtctgaaggatcttcttcccacttcacaatgtccatgttttcgccgtgtaattcattaacaactagttgaacccgttgtcccttaggcccaacacaggtgccgactgggtcgacgttggggtctgttgaacgaacagccatctttgtccgatcaccagcttcgcgagcgattgagacaatttcaacggtgccgtcataaatctctggaacttcttgttcgaataaacgtttcactaaatcagggtgtgtccgactaacaaagacttgtgggcctttagttgtattttccacttttgaaacgtaaaccttaatccgatcatgtgcttggtattcctcgtttggaatttggtcttgcttgcttaaaacagcttcgatcttgcctaagttgacatagatgaacttgttatcgcggcgttcaacgaccccttgcataatttcgttttcgtattggctgtattcattgtaaatgatacttctttcagcttcacgaacccgttgcataatcacttgtttagcagtttgggctgcaattcggccgaagtcttttggtgtgacttcaaaacgaattgtatcgcccacttcgtatgccttgttaattgccaaagcatcttggtagctcacttcaagccgtgaatcaaacacttcgtcagtgacttctttgacagcatagacgtggatgttacccttcttttgatcgaattcaacttccacgttttgtgcttgaccgtaattccgcttataagcagaaacaagtgctgcttcaagggcttcaataacaatctcttttttaacgcctttttcttgttctagcgcatcaagtgcacctaacatttccttgctcatgtaactagcctacctttactaaaattcaattgctaagcgagctttggcaatttccttacgattaaacgttacttctttttgacgcgttttaattttaatcactaaagttaaagtgtcatcatcaagggcttttagtgtaccttgatagattttctcgccatcaacagcttggtataacgagatatgaatgtattcgccaagtgctttttggaaatcggcttccttctttaaaggacgctctgcaccaggtgatgaaacatctaagaaataagcctgcggaattggatccgggtcgattgaatccagtttctcacttaacgcatcgtttactaaggcacaatcttcaaggtcaatgccatttggtttgtcaatgaagacgcgcagataccaactgctaccttctttaacaaattcaatgtccactaattcaaaatggtgttgatcaagaatcggcacgatcagatcgtgaactgtttccacaacggtactcaaatgattccctccaattcatttttatatttcagattagacgtgctccaataaaaagagtgagcatttctgctcactcgctctgaagtatctaattactgataacaatataccatatttttcatgaaaatacaaacaaccgctttaattttcagtggttgcgacgctattttgcgtcttacccgtcgtcaagatttcatggaagttttcaaaactaatttcgaccatgttcttgagagcttcatcagtattcgaaccaacgtgtggtgtcaacaagacgcgggggtataaatcaatcaattcttgagtggttgcatctggaacaggttggtctgctgggaattgcttgaagaagatttcgccttcagctggtaacacgtcagcggcgaatgcaccaagttgatcagctttcaaagcatcgataatcgcacggttatcttgcaattgaccgcgggctgtattcaccaagattgcatcgttcttcatctttgcgattaagtctgcattgatgaattggtcgttttgaccagcgaagtatggaatgtgcaagctgacaatgtcactttgggctaataattcatccaagctgacaaaatcaagcacttccttagcgatttctgatggatataagtcgtaacccacaaccttggcacctaagcctttgtataacttcgcttcggtgtagccaatcttgccagtcccgataatcccaaccgtacagttgcggacttctttactgaacatcacagggctcacacggaaatcatgatgggctgtccgattcgttgtgtaagtggtgtgacgcaacaatgacatccctagcgtcaatgccaattcagcaatcgcgtttggcgagtagactggcacgcgagcaacttccatgttgtacttgcctgctgcggccaaatcgatatgaccgtaaccgactgtccgggtaaacacgtaacgaatcccgtattcattcaacttcgctaagttttgcgcatcagcggtacagttggcacgtaacaagaccgcgtcatgccccttagccgtttcgatattgtcgtgcgtcaataagtcttcaattaacgttaaatcataatcgtagttgttatatttattgaacgtcgccacttcattcggacgaacgccgtaacaagcaattttaaacatttaatttccctcttcctagaaaatcccgatttggttaatcacttctaaaatcactaaccagactggcgtcatcacaacagctaagaccgttgatagtaatgacgcgttcgatgctaagaccgcatccttgtcaaaactaatcgcgtaagcagcggcgaccgttgccgttggcgttgccatcatgatgacaatcgttgccaaactgatatagctaactggtaaaatgtgggtcattgttaagatggccaataacaggatgtttaaagcaggtactaaaatcactttgttaatactataaatccatgatgtcttgtccgaagcagcttctttgaagctgatttcgccaagcgttgtcccaattgctaaccaagctaatggtgaacataaaccagctaagtacgtcattggtttgaacaaccatggcgctgtttgatcaattcgtaagaaggccactgaatgtccagcaaccgccacttgtggtaatgcgccttggattaaccagatgattaaccccgcaaatgtggcgatcacgattggatttaagaacatgtttttcaagttcttcgattccatcttcaagccactcatcttgatgtacccatatgagtataagaacacgcgataaccaatgttgaaaattgagctatacataacccctttagctccgaaaactgctccaacaattggaatcccgaagaacgttgttgaaccaaagatggtcaacacgcgcaatgtatcttgttgatcacccttaaagcgtaagtataacggttttgaaattaaaattaaaataatatagatcaagaagccccaaactaaaacgttgatgccttcttttaaagtcttcccattaatatcttgcatgaatgagttgaatgccaaagctggtaaagcaaccgttaaaacgacttttgacagaatcttcccaaatttatccgtgaagatctcgcgtttgcggcagtagaatcctaataaaataataaacactgtcgacgtgatcgaactcacaatatccatgttcgtaaacgtcttcgttaaaatatcgccaatcctcatctgtactctcctctgttataacatttagtccgctgtattataacacggacaactggtatcgattataacaagaaagtaacggaaaagaaatagggcaaaagaaaaagagtgaaaaataacttcactctttctcagacctaaattttgtattcattttcattacatgctatatattaattatctaaactgccaaggaggccttctcatgcccagacaaagcatcttcaacatgtctctttccaaaatctaccccatgctcgtccaaaaagccgaacgcaaaaaccgcacccaagccgaagtcaatcagattatctgctggctaaccggctactcacaaagcgaactcgacgcccaactcgctaaagacatcccctaccaaacgttcttcgaggaagcaccacagatcaatcccaattgtaatctaattaccggcgtggtttgcggcgtccgcgttgaagccattgaagacccactgatgcaaaaaattcgctggctcgataagttggtggatgaattggcgaaggggaagacgatggagaagatactacgagaataactaaagcactcataaaaataaagccttagggattagcttgaaaaactaatccctaaggctttattcattacacatctaatcttttaaaaactgttgttgaactggtttaaacaaatttctaactgtcccaaagcgaggcggataatcattagagccaccagactcaatcactgttccgtctgcataggtcgcggttactgaccattgctcaccatcaatgatagactcgttaatataatagtcagcccacttcggaagttgcaatcttgaaagtcgattacgaacccgacggatagtatctgcatccaattgaaacctaatttcttcagggtgaataaattcatgcgttaccattctgccaatcatcaaaccagtttctaaatcgagactatatacttcatgcgggccaaaataaccatgacttgcgaattcaaatttatagctccatagtttaaagcattacatatcatattacttcaaaaaagacgttaggaagttttcttcactcttcttcattgcttctttaaacgcttgataacctacagcatcatctgtttcggcccgtacctcaggaatcttcaaacctaattttgcaatcatcaccgattcacggactgatacattatcctcataggttactccttgtctcagatgcaatggcgtaacgagttcgttcgtatgattaggatagatgtaatagccttgttgagcatcaaagcgtgccatatatgcaactaactgcaaataatcctggttaccgatatttccttgtggcttatactttgcatcagcaataatacgctgttcttggacgcgactgataaaatcaggatagattaatccgcctcggtcgaataagtattgtccacccacacgacttttattcattgggtgataaaaccacggtccaatcaattgattaatatactcttcccagagccacgcacagtcaaatagaataccttgtacttgttgactgccgccaccaattcgttgtttttcaaactgcaaaatcattaaacacaaccgttgtaaacttcgatattctctataataagcatgtcgaatcggattttctttatttttagtgataatcgttcgacgatcataatcttcataatgttttgttgcaacaactattgtagctacctcatcagatatcttgcctaacacagccttcccgtacgatttatttctgataaattcaatcgtatggcgaattagcaatgttacttcattctcatatgaaaattcacgttgattataagcaatatttccaataaatgggctattttgcctaatatgacgtgccacatcaattgttccacgtatattactgtcattatattgacgccgaccataagttttaaaaaggcctttgcgtagcgctttttttaaataaagtggcaataaaaaagccaataagtcaaaccccaatctatcccgctgtgcctccgtatttaacgccatcaagttaggcatatcaaacacccgctcaattagatactgaaaaaaataattgttcgccgatctttcaaaacgagactgaataatcagcctctcatcttgataaccaataaaaccagctaaattactggtttgataatcctcattaatacttcgaagaaccatttgatcggcagtaagatcgtcggcattggcaattatttctggaaaaataaaaaggtgatcattctttagttgcgttagcgtttgattaactaatttatttgtaagtttagggatatccttatagtgttcttttaattcacgttgattatccctagtcgttttcagcatcattattcaatcctgccattttattaggattatcatacgctctcttaaagttagtcatatatttcacctcatcatagagtccacgtacatagtcctgtaacaacggttccaaataatctgaccacaattgttcgaaggaaactgttgctagttttagaaagtatgctgcaccaatttgataattttcattcaactcgtccacatcaataattgcctgatttaatgcaaacatacggttggtcgcttcggtttgcttatcccctaaagctgccaacatcccaatatgttcattagccttaacttcaataaagcggaatcgacggcgcgtcgcaaaatcaaaactatcaaccgatcgatcaatatcattcattgttccaataatataaacattctccggaatataaaacttctccatcggatcatcatgtaaattggtatattgcgtcgaaactgccccttcttcaccacgatatcccggatcaattgagaagaatagttcaccaaatattttagagatttcaccgcggttgatttcatcaataatgaaaacatagggtttaggcgccgtcagttgaacttcaacatactcttttagccccaaattatctttcatatattggacaattgcctttcgataattatcatgaccgcccttttcgacacccggtttaccttgataaatattgtaaagctgcgttttattataaaagcgactcttcccttgaatccaattaccaaccccgtactcgcctgggtaggttcttgtcgttagaccatttccttgttcattcagctcaatttgaaagtaaccacttcgagcattcggaatatttaaataaccgacctcctctaattttaaaatgagttgttcccaaactaatttaaaattatcagcaccgcctttttgagcctttcttgcgttcattacgaactctttaaatactccgttttgtaatttaaatcccatttccccatcatcagtggtaaccggacgaaggccttcaacaaaatcagtgtaatcataacttgggtgaaattgaacaaaaccaacttgttgcttctgttctaaggttaagtcagcgtatttttgaacagaaccattactaattaaactcgcagcaatgcccttagcaagatatgatttccccgttccaggggcgccccgtagaataatatttttagattctttcagtttttcctctaaattacctaacacatcattgtccccattccgtactggatagtttgtaaatgttgcataaaaatgagtaagtttctgattgggtatatctttcgaaaataaatctaaatcgtccacttggtatgcttcatttaattcagtatcgtgttgatcttgatgcacaataattcgtaacgtttcaattttctgctgtctgaaacttgcacggatattaacactcttacctactgccaaatcataattcaaatatggcaacttactatcgccttcaccgctaagtggtccatatgatcccgaattaaaaagatggatcatataatgaatattatcgatttccaactcatcaaaattaccggtatgtctaaatcgattcttttcaaaccccgatgcgcccactgtcgtactgcgtccttcttttgattgaatattcaaattcgcttgttcgacaaagcgacgtaataaccacttaaattgactcacattttcatcagtattaacgatacccggcaccttcacttcaaatttttatttatgattattttagcatagattgaaaatatgaaataatcgttttaaaaaaccgtaaaaaccttacgtttttatcgagcgtaaaagttatcgaatatcactagtttatttttctaaaaatgatatgcgaacactgcttatcaattgggaagagcgtaagttaggtgatttagctaatattgttcgtggagcaagcccaaggccaattcaagatccaaaatggtttgataaagatagtgatattggatggctcagaatttcagatgtaactgaacaggaggggagaatacgtcatcttgatcagcgtatctcaaaattgggccaggagaaaacaagagttttaattgagccacatctgctattaagtattgctgcaaccgttggaaaacctctggtgaattatgtcaaaacaggtgtacatgatggattcctaatatttttaaacccattatttgaaagagagtttatgttccagtggcttgacatgtttagacctaattggaaaaaatatgggcaaccaggtagccaagtaaacttgaactctgaactagttaggagccaagaaatacctattcctattcttgaggaacaagaaaaaattggttcattcttcaaacagatagatgacactatcgctcttcatcaacgtaagttggatttgctcaaggaacagaaaaaaggctacttgcaaaaaatgttccctaaaaatggtgcaaaagttcctgaattgcgatttgcggggtttgctgacgattgggaagagcgtaagttgggggacgtagctcccttacgtggcggttttgcgttcaaaagctctgaattcagaaacactggtgtaccaattgttagaatttcaaatattctttccagcggtgaggtaggtggagcttttgcatattatgatgaacaggataaggatgacaaatatattcttccagataaatcagcagtcttagctatgtcaggcgcaacaacaggtaaggtatctatactatctcaaacttctcatgacaaggtttatcaaaatcagcgagttggttattttcaatccgtagactgtatcgactatgactttatttccacaatcgtccgttcagaattattcatgatgcaacttgagtctgttctagtttcaggtgctcaaccaaatgtctcgtcaaaagaaattgattcgtttgactttatgattccaaaattagttcaagaacaacaaaaaatcggctcatttttcaaacagttagacaatactatcgctcttcatcagtctaaagtgggaaaactaaaagttttaaaacaagcctatctccaaaaactcttcccttaaacaaaattcgttaattcaagatattaaaacgactatttatttatactttgatagtgaccaaaattggtcactattttttataggggagtggttagttatgcggggaaaatatctttttcacgaatactttgaagaatggatggtgttatacaagcgcggcgcaattaagcaggttacttatgataaatatgaattaacgcaacggcagattaaaaatcttgcacctacgctattattgtcagacttagatcggcgagcctatcagcaattattaaacgattatgctgcgacgcatgaacatcaaacgacgatggattttcatcatcagttaaaatcggcaatctacgatgcacttgatgaaggttatttgaagaaagatccgacgcgtaaggcgattatcaaaggtgttgtccaaaggcgccataagatgaaatatcttaatcagggtgatttgcgccgactttttggtgtcttgaatctagaagacgaggttaactgggattacttcattctattactcgctaaaacagggttgcgtttcggtgaagcactaggactgacaccatcggactttgattttagaacccaacaactaacgattgataaaacatggaattacaagcattaccgcggcggctttcaatcaactaagaatcagtcgtcagttcgaaaaatttcattagactggcaaatcgcaactcaattcgcacatttaattaaagatttacccgaaaaggaaccaattttcatcgacagaacacgccgaacacataatgatacagcgaatcattatctagaacgtaaatgtaaacaagcgcatatccctgtcattagtgtgcatggtctcagacatacacacgcttcaattttgctatatgcgggtgtttcactagcatcagtggctaaaagacttggccatgccaatatgacaaccacgcaaaaaacgtatctgcatattattaaaaaactcgatagtaaagataatgacaaaataatgcagtgcttgatgacactgaactaagcaaaaaggccgcgaattttcgtggccttttttgaatttctctttaaggaaaaagtttttggagataggcttgttttaattgctgtagctgctcaattttgagttgttgaagtgaaagatcttgatctaatttttgaaagaactctccgattttttgttgctcttctaagtttttagagatgaaaaacattgtttctgatacttttttccagtctgaaggtggcattttcgttccagatgtatcatttgcagctttttggtatttattagtttgaattagattgtaaacaaagttcgaaatattattcgtggatctaaaaatccagaaatcaccaagtgctattcctttaaaatttggcattaaccaattctttaaatacggacgaagtttaccatataatatatcattaggttcaaattcaattccctttcttgtgtcaaattttttacttatatccttatttaatctgccttctccagcagaaatatcttcaaattctatcttaggcaatttattggaattagaacttttatttacgcgaattattatgttcttaaacttaatttgtccccaatcatctttaaaaccactaaatcttaattgtggaacaacttcatttttaacaggaaacatttgttgcaaatatccttgttttaactttttcagcagatcatgctttcgctgatgaagagcgatagtgtcgtctaactgtttgaaaaatgagccgattttttgttgctcttcaattctagggatacttatgatagcttctttgatatcactagaattaatactttcaaatgttgaacccgtgctatatctagtccaataaccgttagacttcattttcccaagattctgaaatataaactcattacctttgatagcagcaacacctcgaccgataaccacgtcataagctgttttgccaatatctccaaccggtgctcgaacactcaaaatgagatcgtttttttcagcttgtttagtgacttgagttgtccatactcttggaaaaacatgaccatttttcatgtcagcattaccttgaacaagaatatgatcattaggattgtcagtataattttctgaattaggagactgtcccatcactatcagaacttcgtcccccaacttacgctcttcccaatcgtcagtaaagcctttaaaccggagttctggttgctttttttgctctttcatttaatcagactcctttttcgttgatacgagctgtgcttccatttctgcaaattctttttccaattttgcaatttctaaatcgatagctgcaatttcttttttaacctcatcaatgtcgattggttcttcttcttcaaaagtgtctacataacgcggtatattaaggttaaagtcgttttctttgatttcatctacagttgcaacatgagcgtatttatcaacatctttcctactcttgtatgcagcgacaatcttatcaacatcgctatctcgcaagttattttgattcttagctttctcgaaatcactacttgcatcaatgaatagaacgtctttcacttggcggtttttcttaaaaacaagaattgtagttggaatacttgtaccataaaataagttagctggtaggccaatgacggcatctaaataatttttttcaattaacgtttgccgaatcttgccttcagccgcgcctcggaataacacaccatgtggcaagacaattgccattgtcccgtcgttgtttaaatgatagagactgtgcaatacgaatgcgaagtcagcttttgaagttggtgctagtttaccgtattcactaaaacgggggtcttttagtttcgtttcattattatcccattttgccgagtatggtgggttagcaaccactgcatcaaaactcctaggttgatcaaccccagcttcatcaggaccgtctggccaatcactttcaagtgtatcagcattgtttaaagtcatattgttaaatgacacatcgtgcatcattaaattcatgcgtgccaagttataagtcgtcgtatttaattcttgtccgtagaacttaatcgctcctgcttgagttgtttcgggtaattgattacgaactgttagcaataatgatccggagcccatggttggatcatatactgagaatgctgtattacttggtgcaacatccatcgtcactagtttagcaagaatcttgctgacttgatggggtgtatagaattcgccaccctttttcccggcactggccgcgaattgtccaattaagtattcataaatttcacctagaatatctttatcttcatcactcttatattcgatatcatcaactaatttgacaatattattcaaggatttagcacgtgccgtcgttgaactacctaagcgcgaatcaccgagattaatgtcgttaaagaccccgttgaaatcttgagcagcctcttgatttaagaccgcatttttattgaaattatcaaaaatcgtttgataatcacttggaataaccgtgctattttcaattcgttcatttaatgattgccacgtatcagctggcgcaatcgcataacctaaacttgacgaaatatcttcaagataatcagctaattcatctgccgttgcttgttcgacataagcttgattaattgtctgcccatcggcaacatcaatcacattattagaaactaaatattgttcctgatgttctgaaaggtaccgataaaacataaaggctaagatataattcttaaattcaccagcgtccatatttccccgtagttcattagccattgcccataatttcttagtgatgtcttgtaatgttgttatctcactcattagattcgttctcctttaattgcggatcttttaatgtattacatgtttatcagctgctaaataaattgcttcgcgtaatccgtttcggtacctgattttcgaaagtgcttggatatcagcatctaatgctaaattcttataactcaaacttgcttcagcaataatatctcgcaattggccagcatcatctaaatcttgttggccatattgatgcgtactaaatagttgtcgtaacccagcactcgtaatcacatctgtgatcccccactggtttcgaaattctaataaaatccgatcaatactaatttgattagcttcttgaataacttgctcactatcgtccaacttgacaggatatatcattgccatccctttaggtggatagtagccatcaaggatcgcttgtgtcgcgtttttaattttgtgcgcataattttggtcttctaagccatttgcaaattgatcaatatccttcttcgtcttctgagcagcctcaattttttcttcatgcatttcattcaagagtttttcaacgagttccgtcaagtaatcgtagttgacttgaacatctttgatgtgcgtcatctttaactcaatttgctgaacaggcactttatcccgcacactaatgtattgttttatttcattcgttaaaacagtggtcaattccttttcttgtgccggtgtcatccctaaagcacgaattaaatcgtccggcgtatcatagttaaatccactatcttcttcaccatcttgcggtgtatattgtttaagtttcgacataccgacgttgtattgtcgcaataattcaaacatctcgtctttttggcgttcacttggtggtaattgattaaaaccatccgttaaatcatccagttggccgacaatcccacgaacctcttgcaccatgtttttaaaatctttcgctaaaacaccagaatcgacgttttcctttttctgttctttttctgataaagtggctgaatccttgttggaataaatggctaatgctttattcattaatttttcattctggctcggccaccgataattaaccactcggccccaaggtttttctttcatatcagcgattcgatttgttcgagagtacgcttgaattagacctgccccttttaaagtacgatcaacatacaaggtattcatttctggcgcatcaaatccggttagtaattgatccacgacaatcactaaatctaggtagttcttgtcagttgcagttcgattaaggcgactcgtaacatcttgcgtatagccagaaacgtcatctaacccaaaacttgttccaaattgatgattataaaccttcatcgcatcatgtaaattctgattggtttcgaccatgccatctttattcgttgtattttgactaaatgtaattgcaactttcagcagttggccgccgttctttgcatgctcttcattcaccttttgaaattctttaaagtacatcatagccattggggtacttgccttaccaccaccaacatgggttgtaaataatgcattgtacttaccttcattggaacggttacgccaattcttaaaaatatcctggacaactaagcgaacatggtcctcattttcatcatagaaactaggcgcaatttcatcgtccatgtcttcttgcgataaattatcaattttatcttgaatctgacgctgttcccaatcgggatgttgttttttatagaagtctggcaaatattgtgttttcatactttccgtatcaatcgtcgtctcaaaatcaactttaaagcctagtacgtttcgatcggcaatagcttctttaatggtataagcatgcagtaattcgccaaaaatatcctcagttcgtaacccattagttgtttcatcaaacataggtgtacccgtataaccaacccatgcagattttttaaagctcttttgcaataattcaaaagcatccccgccagttgaccggtgtgcttcatcaacaataaagacaatgtgtttatcaggtgacttaaaactcttacgcttaaccagtgtttctagtttttggactgaggtaacaatgatattgttatccttgctctttaatttccggcttaagtcgttggtactctgtgtcccttgcacactgccagagcgactatcatcatccactgcaccatcaggatcatacgctttgtaattttcattcgtttgctttgttaaagcaattcggtcaacaacgaaaacaactttatcgactcccggcattcggctagcaagccatgctgttttaaaactggtgattgtcttacccgaacccgttgtatgccagatatagccaattttgtttagtcccatatcaaaatcaacttttttaagtttttgaataacgttttgtgttgcataaacttgataagggcgcatcactttaatcatttgtttgttcttagtaccatccaaaatcataaagttagttgccatttgatgagccattggaatacttagcattgaatccgcaaattcgcgccagttacggacaatcttgttatctgatttccgttgccaattaaacgcaaaatctttgttaaatttgtcagctgttgtattggccatatatttaacattattcggcgtaatcgccaccagaatctgtaatgttgaaaaaatgtcagtgtattgattttctaaaatatattgatgcatctgattaagtgcttcattaacatcatgtgaatctcgtttctcttcaatttgaataattggtaagccattgattaataatgttgtgtcaaaccgccgttcttgcttcccagttagtaatgctggccgttcaatttgattgacgacttgatagactgtattaccagcgccaatttgtttctgatcaaaaacggttaaaaacacatgccgaccatcatctaaatcaatttcaatctgagagacaccatttaacccatataaaaattgaccagcatcatacggtgtttttaaatctgaaatgattttcttcacctgattaaattccatgacacttagcggattatcgagtgtattttgattatgctgctctaaaatctgcttaaaattagcccatagttgttcagttgttctaatatcgtctcgatactgccacagcttagtcttcacaacataatcttttgctgtttcacgaatattacttttttgaaaatcatcctcagaaactgttattgtcccacttgtaatatatttaattaattctgattcgaaatttaattcgttcattcactagtcctttcgcaactgattcattgctatttttagttttaaatccgcactttgctttctaaaccagtttaatcgtatttggttgaaatacattcttccaattaatcgttgctcatctattggtggtagtttattaattctcaacgcttttagctgtgcaagtgtatatttaataaccatcgttccttgtaatgaacttacaagctgtcttttaatattgtgatcctgattcaacaagaaaactaaatagtgagtatccaaatcctgattagggattaatttaataaaattttgagtttgtagatagccaacatgcttttttccaacaacacttgcttctccagaaactaaattaaaaataatatcgccttctgataaaatcataactttatcaggggtccgaatttgacgtccctcattggacgatgtttctgactgaactaaatcagctttcaattcagattgcccataaatacaataactgggatcactttcattcattgaaacaaatagacgagattgtggagagccactcacaaattcaacaaacttactaagtttctccattaaatcctccttcaacacttatttaatatgcttagtatacgtcgaatcaaaagtttattcaacaaattttatgtaattttttaaaattgcataaaatgtgtgcaaaataaaaagccttcatacttctccgaaaatttattttcagtgaaagtatgaaggcttttttacatcatatcaaacaacgataactgattttcatcaggcaggtcattcaatacgttattttctgttaggtattcgatcagtgtcttggaaactttcccacggttggataagtcttctttagataagaatggcttttcttcgcgggcggaaacgatttgtttggcgacgttaccgcccagacttgggacggcacggaatggcgcaagcaaggtgtggtcgtcttggatcaagaagtcagatgaatctgatttttcgatgtcgaccatcttgatgttaatcccgcgttccaaacattcgttggcgatttcgagaaccgtcaacaaattcttttccttggtgctggcttccatccctttatcggtgatttccttcatgcgcgctttgacgccttctttaccttgggccatggccacgaggtcgaaatcttcggcacgcacactgaagtaagcacagtaatagataattgggaagtacaccttgaagtaggcaatccgcaacgccatcaaaatataggcggtcgcatgggccttggggaacatgtacttaatttttaggcaggaatcaatgtaccagtctggcacattttcgttgtcgcgcatggcttgttgccagtcatccggaatccctttacccttacgaacccgttccatgatgttaaacgacatactatcatccataccccagtgaattaaatccatcatgatgttatcacgacaaccgataacgtcttttagggtaacaacgcctttgttaatcagttcttcggcattacccaaccacacgtcggtcccatgagaaagaccagaaatttgcaataattctgagaacgtcgtggggtgcgtttcttcgagcattccgcggacaaaccgcgtcccgaattctggtacaccgagcgtgcccattttcgaattaatctgttctggcgttaccccgagtgaatcagtgccggagaacaaggccatcacaccaggatcatcggttggaatcgtcttgggatcaatccccgataaatcttgcagcatccggatcatggtcggatcatcatggcccaggatatcgagttttaagatattatcatggatcgaatggaaatcaaaatgggttgtcttccaggctgcatcttgatcgtcagctgggaattggattggtgtgaaatcatagatgtccatgtaatccggcacaacaatgattccggccggatgttgacccgtcgttcgtttaacgcctgttgagcctttggcaagacgatcgacttctgcgccgcggaaagtttgttcggtatcacgttcgtaggctttgacatagccgtaggcagttttatcagcaaccgtcccgatcgtcccagcgcggaacacgttattttccccgaacaagactttggtgtagttatgcgcaaccggttggtaatcaccggagaagttcaaatcgatatcgggcactttatccccatggaacccaaggaaggtttcaaatggaatatcatggccatctttatcaaggggtgtcccacattcaggacagtctttgtcggctaaatcgtaacccgaaccgacttcccctttggtataaaattcggagtagtgacaatttggacagcgataatgtggcggcaatggattaacttcggtaatcccggtcatcgttgcgactaaactcgacccaacggacccccgggaaccaaccaaatacccatccttaccgctcttatacacgagcttttgcgaaatcaggtaaataaccgagaacccgttcccgatgatactctttaattctttatcgagacgtgcttgcacgatttcggggagttcatccccatataaatcgtgcgcacgattcatcgttaaggtttgaatttcatcttcggcacccgccatcttcggcgtgtacaacttatctttaaccggtgtgatttcatcaatcatatcggcgatttggttcgggttcgtcaccacgagttcttgggcaatatcggcaccaagaaaatcgaacgctgtcaacatttcatcggttgatcggaaatgaacatccggtaattgtgaccggttcaatggattagccccacccattgagtgaatcaaaatcttacgatagattgaatcttctggattcaaataatgggtatccccagttgcaaccactggtttatccaattcagcaccgagtttgaccatgttgcgaatgatttcttcaagcgcccgattatcgcgaactagttcacgttctaataatggtgcgtaaacggcttttggcattacttcgaggtaatcgtaatacttcgcgcgatcgcgtgcttcttggtagcctttttgcatcatcgcttcgaagacttcaccgctggcacaagctgaaccgactagaataccttcacgtaaggcatccaagcgactctttggcaaacgcggcgtgcgataatagtattcggtcatcgatgctgaaaccagtttaaataagttcttcaacccagcttgggtttgcgccattaaaatcgcatgcgctggccgtgcttgtttatacgcatcgccaatcccaacgcgatcattcagttgattgacgttgaccatcccatacatctcggccgcttcggcttctaatttgtataacaaataaccggttgattcagcatcggcgttagcacgatgatggtgttccaagttaattttataccgcttggttaacgtatcgagtttatgatttttgtattctggatgaagcatccgagaaacttccaacgtatcgatgacgggattttcaatctgaccgaggtcgttacgaccatagccagcattgataaagcccatatcaaacgttacgttatgcccagctaagacggcgtcgcccgcgaattctttgaacaacgctaggacttcggcttctttcttagcaccgtgcaccatttcattggtgatactcgtcaattgcgttgtgaaagctgataacgggtgaccgggatcaataaattcatcgaacgagccaatcacttcgccatctttcattttgacagcggccaattcgataatcgaatcgtaaacggccgataatccggtcgtttccacatcgaaaatcacgtattcagcatggtcgagcgcttcatcgcgcaagttatacgcgactggcgtgccatcattgactaaattgacttcgacaccgtacaaaatcttaacgccgtttttcttacccgctgcataagcatctgggaaagcttgtaagttataatgatcggtcaccgcaatcgcggattggccccatttagcggcttgttgaacaaagtcgccaatcttgttggtcgcatccatttgtgacatattggtgtgcaagtgcagttcgacgcgcttgccattttcagcggtatcttggcgtttgggatggctaacttccaccaaatcattggcgttgaccacgagatcacgcatgaagttatcttcttgaacactcccacgtaccttgaaccacatgcctttatcgatggctgcgaagatactttcgtcgccgttatcccgggagaatttcttgaccgtaaatgatgatgagtaatctgtcatcttcaaaatcaagagctggcggccagagcgtaaaacgcggacttctttatcaaagacgaacccttcaatgacaacggaacgttcttcttcattgattgtaatcatctgacgagttggttcagcaggatttaagccgcggcccattgaaatcgggccatcgactggtttaccttctgattgacgtttttctttaagtgcttcatttttcttgatcgcttcggctgccgcttgtgcgcgggctgcatcttgttcagccttctttgcttgaaaatcttcgattgccttttgtgaggcggattcgtcaatcaagggttgaatcgcaaacttgggaaaaccaagccgttgataaccagcttggattgtcgtttgcgcttgatttaagaagaacgtcttcacgatgtcgttttcgacaactaaaaagacgttgcgaccatcgatatagggggtctctttttcacacaattcgtgcaacattgaagattgaatcccactatggttgatgacgtattcccaataagctgctaaaacgccgccgtccaattcagttgcatcggtggtaatttccactgaaacgcccgcaatcgctttgaatgctgcttctaaatactgttcaaacgttgtgtaaacagcatatggcaaaacggattcgaaatgtaatttaaacgtccaccgtttggatgtttcgtggacaacgacttgttctacttggccagttttgaagccaggataattcgcaacatccgcgggtaaattaatttgttctaataatttttgaaacagtgcggtttgatctaatgccacaaaagggcctcctcatattcagaaagttaaataaaaggggctaggacaaatatcattctgtctcagccctttttagatgtccgaacatttataatgtaaacgcgctttttgaaactgcctcttgcgcttaactacaatccgcgaacgatcgacgttgtcgctcattcacgaatttaagttaatgcttggagccaaacggtttcaaacgcactctattcctaaacgtgcttttcaagctaactttctgcgcttagcgctgggaatcaaattatcgactgcgtcgttaattcgcttccctgtgctaatgctcaaaagttgaccgagcttgaacgcactctattcagcttctgttgtctctgaagccaataggatacttaatgaattaatcaattcatccttcttcacttctagggtttcacccgtcttacgtaatttaacttcgacgatttcttctgctgcttttttaccaactgtgatgcggattggtaagccgattaagtcactgtcggcaaacttaacgccagcccgttctttacgatcatcaactaagactgagtaacctgcttcttcaagtaaattttcgatctgttcagctaataagacttggtcagcatctttgacattgaccggtacgacatgcaagtcataaggggcaatcgcgcttggccaaactaagccgttttcgtcagcttgttgttccgtaatcgctgataagaggcgactcacaccgattccgtaagaacccatgataattggtttcgcacggccattttcatctaagaaagtggcaccgaattgttcagtgtaacgtgtgcctagtttgaagatatgcccaatttcaatcccctttgtaaagtgcaagttcccttgaccatcaggtgatgtttcgccttcttgaacgaaacgtaggtctgaataatcagctacggtaaagtcgcgcttgctgttgacattcgtgaaatggtgatcggcttcattcgccccaaccacggcattcaccatggcttcgacactgtaatcagcaacgatttgtaagtcttctggcgcgttaactggtccgattgaacccattggtgcgttcattgttgctaagacttgttctggggttgccatttctaagaaatcagcatctaagaagttcttcaacttcacatcattaacttcaaaatcgccacgcactaagaccaagaccggttggtcgtcagcgataaagaggacactcttgatgatttgttgtgctgggacgtctaatttagcagccacttcttcaattgtgtgggcatcgccagtcgctactttttcaagctctaattgcacatcacttgagttttgcttaggacggacactcgttgccatttcaaggttggcagcataatcactttggtctgaataaacaatcgtatcttccccaatttcagcaatcgcagaaaattccattgaatccttaccacccatggcaccggcatccccaacgattgcgcggaagtctaacccacagcgttcaaaaatgttggtgtaagcttggtacatttggcggaaagttgtatccaaatcagtttcattggctgagaatgaataagcatcttgcatgatgaattcacggccgcgtaataaaccgtaacgtggacgatcttcgtcacgatacttcgtttggatttgatataacgttaatggtaattttttgtatgatttgatttcattgcgcaccaagtcagcgaaagtttcttcgtgtgttgggcctaagatgaagtcgcggccatgacggtccttgaacttgaataagttatcgccataagtttcgtaacgacctgattcttcccacaattcagcaggtaaaatccctggcatttgcatttgaacggcgtcaatcttgctcatttcatctttgatgatggcttggatgttttccaagacgcggaatgctaaaggtaagtaactgtaaacaccagcagatacttggtgaatatagccggcccgtaacatcatccgatggctcttagcctcggccgagttaggcacttcctttaaagttgggataaataattttgactgtttcataatctgttatgcctccaaaaataatctaaaagaaaaagcgttgaatatcgttccatgtaaccaagaccattaagacgaccatgatgccgaccccgacaagggtgacaatgccttctttttccggtgagatgggtttaccgcgaatcgcttcaatcacgttgatcacgagcttaccaccatcgagggctggaattggaatcaggttcataatccccaagttgacggataagaacgctaagaagtagacgagcattgtaaagccttgactcgcgaattgcgtcgtcattgaatacatgccgactggtccggctagtttattgagtgaaaaaccacccgttaagaatgacccgagaattttaaaaatctgggtcgcattcgcccatgattgggtgaagccatatttcaacttagcccccacgctatggttgagtccagctgtcacaccaatttggccgactttccccttttgcccctcgactttcaccgctttaggtgtgatttcgagtgacttagtttgctttgcccgtttaacctggacattcactggtttattcggatattttgcaatcaccgagctgaaatcagtaaacgtcgtgacttttttgccagcaactttcactaaccggtcatccattttaagcccggctttttgtgctggcgagtttggcatcactgtgccaacaatcgctttgttttgtgggacgccaccgtttaaaaaagcaaagagcgcaaacgccacaatcgcaaggataaagttgttgaacggtcctgcaaagttggtcaacatccgattgattaaactagccgactggaattgaacatccacgggtgcgatttgcacttccgttccgtctgattcaacaatcgttgcatcgtgactgaccgaataacgctttaattcggattcgtcaccactttcatagccttcaatccataattctttttgcaagtcagtttttgcaatttgaaatgggacaccgtttaacgtggttactttgtcacttgtattaattttttgaacagtttcttgttcgtctaacagcaaggttgcttgcgtgccggcttcgatttcagattcatcatccgccatccccgccatgcggacatagccgccaagtggtaaccaacgaatcgtataagtcgtgccatttttgcgcgttgcaaataattttggccccatgccaattgaaaattcacgcaccaaaataccagaacgtttcgccatgtaaaagtggccaaattcatgcaccactactaaaatgccaaatatgataataaacgcaataatcgccgccaatagagtacgactcccttctaaatgcgtatttcaatactctcatttgatatgaactgttatattatatcacgaattccttagaaacaagaaaagcgtttagcgcaaaccaaaaagttgcgctaaacgctagataatattgacttttaaaaacgtgctttttggttgcaacaacttccgcttaatctaaaaattcaaacaatcctaaaaccgggattattcgaatttttgtattaatgctcagttgctaaccgccacaaacgcactctaaatcatgccaaacaagtgtagtagcggtaagacaaacaacatgctgtcaaagcgatctaagatgccgccgtgacctggtaagattttacctgagtctttaacgccataatagcgtttgtaagctgattcgactaaatcgcctaattgaccggcaattgagaagatcaacgttaaacctaacatgacaggcattgaataagcttgtgggaagaagtttaaataaatagctgcgaccactaatgctgataatgtcccgccaattgaaccttcccaagttttattggggctgatagctggccacattttattcttaccaaacatccgtccgaatgtgtaggcaccgatatctgtcatccagatgaccaataagatatacatcacagtgtcaaaaccaccaatatttcgcgttgcggctaaataatggaagcctaagccgatatagagactggctaaggttgtgacacccatatcatcgaagttaacccggtttttcgtgaagactgtgatggctaataaaatggcaacgaagaagtagaataaatcaaattgtgacacacctgctggtaaccagttaaaggcgcctttgggtgaggctaaacttaacaccgctagtccggcgatggttgcatcaggtgagacaataattcgtttacgcatgatgaaaacttctgataaggcaacgagtgctaaaacggctgccgcgatatcaatgtaaataccaccaaagaaaatgatggggataaagatgattaaagcaattgttgctgtaatgacacgttgtttcataattgtatttcctcctatttaagaccgccaaaacgacgattacgtttttggtaagcgccgattgagcgttcaaacactgctggggtaaagtctggccagaattcatctacgaaaacaagttcgctgtaagcaatttgccagagtaagaagttcgaaattcgctcttcgccactcgtccgaatcaataattctgggtcagtatattcccctaaaaagccagtcatcaagtaatcactaatcaacgcatcgtcgattgcatcgacctcaattgtaccatttaccgcatctttagcaatctgcttaaccgcttgttggatttcgtcacgcgacccataattgagtgcaaagttcaaaatcatccctgtgttatcagccgtatcggccatcgcattgttagccgctttttgcgtcttttctggtaattcttgaatattacccatgactttcacacggacgttttcagcaatcaattccggcatgaacgtatcaaaaaaatcgaccggtaactgcatcaagaagttcacttcgtcatttggacgcttccagttttcagttgaaaaagcgtacaacgttaagactttaacacccattcgactggccgttttggtaatcgtcttaacgttttccattcctgctttatgcccagcgattcttggcattaagcgtttcttcgcccaccgaccgttaccatccatgatgatggcaacgtggttggggatattggtgggatctagttgttgtgcgtctgtttttttatttgtaaacaccacatactcctccagtttcaataactctcatatgattgtaccaaaaatcacaggaagtgactatttaaaatcaaccgattgtcaccggcattgtacaaactgaaccgcccattctgcactttttgagttcttcccagatgatttttatccacgattaagcctttaataccaacgattcccgccacaacgtactgttgccgctatcacattgaaatttattgttaaatattagtagattcctatagttattggcatgtaacaggttaaatatgataaactaatacataccttaaacagaaaaagggagtttattatgcgaaaaaccttcgaactctttcgacttgattggcgtcgaatcttaaaaagcccgatcgctcttctattaattattgccctcattatcattccatcgctctacgcgtggtttaatatctgggcgttatgggacccttatagtaaaacgcaagacttaaaagtcgctgtttactcagccgatcaaagtgttgtcattgctgacaaaaaagtcgagattggcgccgaactaattagccaattaaagaaaaacgacaaattaggctggcaatttacttcgagcaaaaaagaattagatgacggcgtaaaaacggggaaatactacgccgggatttacgtgcccaaaaacttctcaaaggatctcgttagtttcgtcgatggcaagattcaaaagccaaagatagtctactcatctaatgataagattaacgcgattgcgcctaaaattaccagcgcgggtgcaactacgcttcagtccaccatttcagaagaattcgtctcaaccgttggtaaaacattgatgagtaccctaaacaaggccgggattgatctcgatacaaatctccccgtcattaatcgtttctcgagcctcattctcaaaacagaccaacaaattccagaaattaaccaatacgcagaacaagtgcttaatctacaaaagaaactaccggaaatggaattaaagcttgcccaagccaacgagttcgcggcctttttaccacaagcaaatgccatggcgcaaaaagtagtcggcatcaatcaatacttaccacaagttgaagcagccggtcagctcgcaacgaaagttcaggctaagattccagaaatccaaagtgctggcaaacaagttgccacactcgattctgatttcgatggcatcgccaatactttaacgaacggcattaacgaagctcaaactggtttagatgtgttaaacaaaacacaaaaagtcttaccggacttaatgacttttagccaaacggcccaaggtgtcgcgggtcaattacaatcagacttaatccctaaactccaagctgctttaccggtcattcaaaaaacggtggatcaagggttagccattaccaatcaattggcaactaacatttcaactaatttaacggccgtcaatagtttgctgagtcaactcaaagaggatcccaataatgctgaactcaagcaagcgctcaaagaagcgctccagaacttatctgatcacaccgctaccttgcaaacccatgcgactcaacttgcgacaaccctccaaaacttgcaagacagctacaatcagtcagcagtggcgaatggtcaaccggaatcacatgcacttgatacaccgattaaacatttaaatacgttggcgacccaactcggcgtttttaaaggccaagttgatgaccttctcgcccattacgatgatttatcaattgacgatttgcaaaccaagattaatggtttgattcaatacgccgaccaagtcgaagacagcgtcgctaagattcaagcggcccatatcggtgacagcgtcaaaaatatgctcgaccgcttttcaacattaattgctagcggtaatgccgtcttaacacagcttaacggcgaagttttaccgaaactccccgcactcttattcaacacacaaaagacgctccaacaagccatcgactatctgcaaaaatatgctcagcagttaccagcgttgaaacaagaaattcatgacgcgaatacattattaaatggcaatatgggcacgattatctctggattaaacaccgcttctgacgtttaccagaatgattacccactactcaaaaataaactgcaactggcaaccagtttcatcaacaatgacttaccaggcatcgaaaacgacttaacaacgacgctcaacatggccaacgagaaattcccactcgttaaaaccgccttaaatgatgcgaccaacctcatcaacaatgattggccattcttacgtagcgggatccaaaaaggcgctgaggcgattcgcaaacaacaaaagacggtcgatctcaaagatctgattaaattgcttcgccgcgatgcaactaaggaaagtaatttcttagccaaaccggttgaactgaaagaaaaacacgtctacccgattaagacctatggctcagcaagtgcgccgttctacacagccctttgtctctgggttggtgcacttcttttgagtaacatcgtcttaaccaacttcgcgttagacgacaaacaaaagaatcagtacactaagaaacagcaatttattgctcgctggctaacctacatcgtcattggtatcgcccaagccgtgattgtgacgcttggtaatattttcttattgaaggcctacatcgttgataaactaccgctaatcttattagccgtcttcctgagcatggtcttcatgacaattgtttacgttctcgccgcgatgttcgggaacgttggtaaaggaattgcgatgattgtcttggtgctttccatctctggcggtggcgggaacttcccagttgtcctctccgatcaattcttccagtttattaaccccattttaccgttcaaatacggggtcaacctcttacgcgaaccaactggtgggatttacgcaccgaacctctggcataactttatcatcctagcgctctttgcggttgttttcttcctaattggcctcttcctgaaagatcgaatcaatccattctttgaaaaactccacaaagaagcgacgaagagtaaaattattcattaacgcaaaaaaagccccgccactgttgtggcggggctttttgcatccattagggattaaccttctgtgatttctttttctttgttcttggcgatttcgtcaatcttcttcgttgcttcattcgtcaatttttgaacttgttcttctaaatcatgcatttcatcttcactaatctcgcttgctttttcagcttttttcaagctgtccattgcatcacgacgtgcatttctgatggcaactttgccgatttcagcttctttaccaacttctttagcaatttccttccgacgttcaccagttaattgtggaattactaaacggattactgagccatcgttggctggtgaaatccctaaatcagctgtataaagagctttttcgatatcttcaagcgcacccttgtcataaggggtaatcaacaagacccgtgcttctgggactgtaattgcggcgatttggttaagtggtgtcattgcaccgtaatactcaacattcacgcggttgaccaagcttgcattcgcgcgaccagcacgaatttggcctaatgttctttgtaatgaagcttctgctttttccatgcttgcttttgcttcatctaaaattggatttgccatattattctcctccttcgatcgttgtcccgatgttggcaccttcaacaacttttttgatattgtttggttcgtttaagttgaagactaccaatgggatatcattgtccattgataaagtacttgcagttgaatccatcacttgcaagcctttgttgataatatctaaatgtgttaatgtgtcgaatttaacggcacttgaatcagtgttaggatcagcagagtaaacaccatcaacgttgttcttagccatcaagatcacatctgcatcaatttcagcagctcgtaatgcagccgttgtatctgttgagaagtaagggttccctgtcccaccagcaaaaatcacaacgcggcctttttctaaatgacgaacagccttccgacggatataaggttctgcgatttgacgcatttcaattgatgtttgcacacgcgttgggacaccaatgctctctaagttatcttgtaaagctaaagcattcatgaccgttgccatcatgcccatataatcggcttgcgcacgttccatgcccatttgttcaccagtcacaccacgccagatgttcccaccgccacagacaatggcaatttgaacccctaaatcgtgaactgatttgatttcgtttgcgactactttaacaatttcagggttaattccgaaaccttggtcgccagcaagtgcttcaccactcacttttaagacgatgcgtttgtattttgtatttgacatgattgatatccctccgttgattactaggctcattttaccatatttaataagttatttgggtatgcgattctgaattatcgtaaaactgcaaaaaaaaggagcgcaaattgcgttccctttttgaagcaaaataagcttatttgatttggcccatgacttcatcaacaaagttattttcttttttctcgatcccttcaccaactgtgaaacgaacgaaacctttaacgctaccgttcttagatgcaacaaattgtgcaacagtttgatctgagtctttgatgaaagcttggtcgttcaagctgatttctgacaagaacttgttaacacggccttcaacgatcttaggaatgatgttttctggtttgccttcgttctttgtttcttcagttaatacttcacgttcgtgagccaatgtttcagcaggaacatcttcacgagaaacgtattgagggttaacagctgaaacgtgcattgcaacgtcatgagctgcttcatcgtcagcaccttctaaagtaactaatgaagcgatttggccaccattgtgtaggtatgcgccaaagtgatcgccatcatttttttcaactaattcgaaacgacggaagctgatcttttcgccgataacagcagttaagttgattactgagctagcaattgtgccttcgcccattggtaatgcttctgcagctgccatgtcagctggtttgtttttagcgattgtttcagcaatatctttcaataaagctttgaattgatcgtttgaagcaacgaagtcagtttctgagttcacttcaacgattgcagcagtgttaccatcgatggcgatgcctgctaaaccttcagcagcaatgcggtcgctcttcttagcagcctttgccatccctttttcacgtaaagcatcgattgcttgagcaacgtcgccgttactttctacaagggcttttttagcgtccatgatcccaacgccagttttcttacgtaattccattacttgagcagctttaatttcagccataattcatacctccgacaatttatattcaatataattggtttaaaaaaagctgtcccacaagtcaggcagtatttgcgaaacctctaagacagcttatttgaatctactatttagcgtcagtgttagtatcgttgtcgccttcaactgcttcaacgatttcttccattgagtctgctgatttgttttctgcagcaaatgtagcttcttcaacatcatcttcaccttgacggccttcgatgatagcatcagccattttagctgtgattaaacgaacagcgcggatagcgtcatcgtttgatgggataataacatcaatatcatcaggatctgagttagtatcaaccatagcaacgactgggatatttaatttttgtgcttccttgatagcaatgcgttctttacgaggatcaacaacgaacattacgtctgggatgcgaggcatatcttcgataccgcctaagaatttttcaagtttttcttgttgtttcttcaacaaggcaacttctttcttaggtaaacgatcgaatgtaccatcttcgtccattgctttgatttctttaagacgtttgatccgtttttggattgtgtcccagttagtcaaagtcccacctaaccaacggtggtttacaaagtattggcctgcacgtactgattcttcagcaattgcatcttgtgcttgtttcttagtaccaacgaataagaatacaccttcgttagcagcttcttctttaacgaagtcataagcatcgtcaaccatgcgaactgtcttttgcaagtcgatgatgtagataccatttctttcagtaaagataaatttcttcatttttgggttccaacgacgtgtttggtgaccgaagtgaacacccgcttctaataattgtttcattgacaatacagccatgtcaacagacctccatatggtttttttcgaccactggtttcacttttttagagaacttgtcgccaagcacctctctagaaatcaaccagtgtgaattattttttggtattgaaataccgtttaaaagtatactaaaaataacaaggcgcgtcaacaagaacttacatgccgcccaattgtttctgataacgggttgcatcttgtggttggtggctcactgaggtaacgccactcactgtttcaaccgctcgatagcccgcttttagcgcgacttgctgactcgccacgttttcgtgtgcagcaatgatactcaactggtcaagttccaattcactggccgcgtattgttcaatggcggctagtgcgcgatgcatgacacctcgtccgcggaaagcttcatctaaccaatagccaacttcacccgcacgatccaagtcgtcaatattgtgaacatcaatcgtaccaactaactggtggtcatcccaaatcgttgccatccaaagttcctggtttgccatttgttgttgcgcatattttaaaaagccaagttcatcggccactgattcgatatcgcccacccatggtaaccaagtatcgagattgacgcgattttgatccactaactgaaataacgccggcgcatccgcttccgtcacaggttgtaaatgaatgtgttgatcgacaactaacttaggttgcatattggtctctccattctaaaattgagttcttgaaatgccatgttccattaaatattgttcttttttgcggcggggttgatgtttgaacgcatactctgctttaagcgccgccgatttatcactaaacgtttcaaaatataataaccgcactggtcggcgcaattttgtgtacttcgcacctttgccagcattgtgcgtggcaacgcgtttggtaacgtcggtcgtgaaccccccataaaaactatgatcggcgcagactaatacgtaaaaataataagccttctcagtcattgtcagccatgaataacttcgtgcgcatctctggtgtatagtggctgtcttggtcataaatcgtcagttccggaagcattcgtaagcccccttttttaccatctttgaccgcttcaattaacaccatattcgcttctttgcctgctttgggataaacaaaccggacgcgtttgggttccatgcgtgcggcgcgtagttcgtcacagatttctaagaaccgttcgggacggtggactaaataccctttaccattcatctttaacaggccactcatggtttgaaccacagtgcgtaagtccgttgcaatctcatgccgcgccagtgccagatgttgattgggatttttttgactattgggttcaaccttaaaatatggtggattacaggtcacaatatcgacgctgtccttatgaatcttagtgttaacgtctttcaaatccatattgagcattgtcacctggtcggttaagtcatttaattcaattgaccgttgtgccatgtcggccaaccgttcttgaagttcaacaccgataatttgaccatttgttttgggactcatgaataatccaaccgccccattgcctgcgcacaaatcgacaatcgtcccgcgttttggtaactgggcaaagtcggctaacaacaccgcatccatcgaataggaaaagacggatgggctttgaataatctgaatatctaagcgaaataattggtcaattcgctcatctgcttttaacatcgttctaccttcaacctcatttgtatttaggcatattataacaaagagtatcattatttggtataatgagcagatactagtcacgtttgaaaggaatctaaactatgtttttctcatttgcacgttttatcgtccgcattttagcctggttattgaatggcaatttgaaggtcgaaaataaagaagccctgcccgaagggacttatgttttagttggcccgcaccggacttggtgggatccaatcttcttcgcacttgctgctagtccccgaaagttcacgttcatggctaaagaagaactctttaaaaacccaattttacgcttcatcttaacccacgcaaacgcatttcctgtgaaccgaacaaatcctggcccatcggcgattaaaacgccagtaaaagcccttcgctcaaaagaactttcgttaatcatgttccccactggtagccgctattcaagcgaacttaaaggcggcgcggtcgtaattgccaagatggcgcgggtcccactcgtaccagcagtctaccaagggccattaaaattctctgatgttttaaaacggaaaaagattacgattcgttttggtgaaccaatcccaatcgatccgaaattaaaactcaacgaagagaacttagaagttgtcaatcatcaaatgcaagccgcatttgatcaaattgaccacgaaattaaccctgattttaaatatgaactacctgataaaaaataataacaaaaaactgctagatgatatcatctagcagtttttttagcgcgttaaattcttaaccgcattcgtcaccaatagataggccgtaactaatgccactgcaatccagccaaattgtgttggaatcgcttggaaatcaacggcttgtctgagcggtgtcaataccagaatacctccaattaacaaactgattaaactccccaagtaaacacgccaatttgcgcgatccttggacggtgatgctggtgtccgtaatacataaactactagcatctgcgtcaataaaccaacgacgaaccaactcgcttagaaagccccctgttgagctgatgtttgcaggccaaatccaaaccagagaatcgcaaacgttaaaatatcaaccattgagctcaacggtcctagaataaacgcactcttcagtaagcctttagttgcccactgtgttggttggcgcaattgatcttcagcaacccaatcccaaggtaaccagagttgtgcgacatcatacagtaaattctggacaagaatttgcagtgacaacattggtaaaaatggtaaacagatgctggcaaccagcacgctcaaaacatttcctagattagaagctaacgtaatccgaatgtacttatacatattgataaagactctccgtccttcaagcaccccgtgttctaaaacattcaaatctttttccagtaggattacatcgctagcatcctttgtgaggtctgcggcattatcaactgaaatcccgacatctgcttgtttcaaagctgtcgtatcattaatgccatcgcctatgaaaccgacgacttccccttgtgcttgtaataaacggattaaacgcgctttttgaagtggagccaatttggcaaataatgcttgctcggttaatagctcactgacttgtgcatccgttaacgtctctaacatctcaccagtggtcacagctagattctgaatgcccactttttgggcaacttgctgcgtcgttaaagcactgtcacccgttaaaattttgaccgccacttgatgagcttgtagttgttgaattgccgagatagctgattgttttggtgggtccaaaaagcccaaaaagccgtcgaaaatcaaaccttgattaccaacgtggtcaattgatgccgtctctgctaagtcatcttgataagcaaccgccagcatccgcatcccttgttgtgccaaacgatcatgcactgccactaggttctgcttttgcacttcagtcaacggctcaatctgatccgctaacctgacttgggaacacgttgctagcacttcttcaaaggccccttttggcactaattgattacctgcatggtttttgagccagaccgttagccgccgccgctcgaaattaaatggaatctcgcccaatttttaatatggaaagtcatcattggtttggtcttgttcatagtaatgaataatcgcttcatccagaaggttctgccagccggattgacccttggcgttcaaatatgctaatcgcaaaacttgcacatcccgctttcctaaaatatctgcatagtacatcaatttaatatgatcttccgtcaacgtccccgttttatccgtacataaaaccgacatcgccccgagattctgaatggcctttaactgctttacgatgacctgttgttgacttaaaacgacactgcctttcgccagattactattgacgatcatcggtaacatctccggtgtcaaaccaactgccactgcaatcgcaaagaaaaacgactgttgccaatctcccttagtcacaccattaatcacaaatacaaagggcaccaaaacgagcatcatgcgaattaataaccaactgatgtgttttaaccctgcattaaattgattcggtcgcgacttaggttcagtagtcacaattgcgctaaagcaagtcgcttgacccgtggcaatcactaacgcggtagcttgcccattgacaacggtgctgcccatcagcaataaactcgccatatccgccgcattcgttacgtcagttgcttgcgctgttatgcgtttgctcacgggttttgattcacccgtcaaagaagattgattaatttgtaaatcatggctcgccagaatttttaaatcagcattcaccaaatcccccgtctgcagctgcacaatatccccaggtaccagactttgtgcggcaacttcagttggttgaccctcaattacaacccggctggtctttgccaacatcgcttgtaaagcaatgctcgcttgctcggacttgcgctcttgcacgaatcgaatgctactagacacaacaatcatgattaacataactatcgcgccatcaatatctcgactgagccaggagatgatcattaagacagctaatacgccgataaacggatcttgcacgctctgccaactagctcgcaataacgaacgctgttgccgcttttgaatcgtattttccccataggtttgtaaccgtgctgttcgttgctgccgtgataaccccttcttgtcagtttcgaaatgttctaaactcgcttttggcgttaattgattaatctgattgagtgtcattttaattgtcttagccatcgtaatccctctcattcgcagctgatccgcataaaaaaggcatcctcaaagaaaggatgcctcacaagaaaaacaagccattccaatcgttgagctttagcactatatgacgtagaactttgttcagctacattagaaaaagccttcagggcagtttctgttgactcaattggcatctctcgatgtttctgagtagcagcgtttgttcatataggagcctcacctaacggattagcgatatcaatatatttatatatctatcataccaaatcgacttcaaaatacaattaaacagacttattgaagatattcatttaaaaattgcgcaactttattacgataggttgttggatctgtagccaaggcttcaccatgagctgcccccgaaaccacccagagttgtttaggtgcatgcgccgctttgtaatttgtatacaccattttggttggtacaaatttatcttgatcgccatggatcatgaagattggcaatttcgagttagctaaactcttagcagtatcgccatcattaaagttatagccggcgcgaacccgtgccatccaattcgttgtgtaaaataacgggaatttcggcaatccaaagagatcgtttagttggtatgcgagttcgtcagcgatgctattatacccacaatcttcaatcaccgctttcacctgcttaggtaattcttcacccgcggtaaacatgacggtcgcgccacccatgctgaccccgaaaagggcaatttgactatcctgtccgttggtagcgacaatttgttgggcccacttgacgtaatccaagcgatccgtccaaccatagccaatggcatcgccttccgattcacctgctgcacggtcatccggcgcgagaacgttgtagccaagatcgtgatacatgtgaatatagcgtgccatatcctcttttttacccatatagccgtgcgcaactaaaattgttttgttcgtaggttttgttgctggcacataaattgccgccaattttaaatcatctgtggcagattgttgatgccactttgattgtttaacattttttaaccaacgttgattgtcttgatagactttcgttggcttaccaccatttaaaaatgatttttgccccggtacaaatgcgtattgatacatatacatagtggcaccaaatagtgctaccaccactaagacaacaacgctaattaacgaccatttcagccagcgtcttttcttcatgtgctaaattcctcccgatttactccgcaataataatagtcgtgtttttttgaaactgcttattcttcactgccaccattttggagttgatacatttcataataacgtcctttttgagccactaagctatcatgattaccccgttcgacaatctgcccttgatctaaaaccaagattaattcagcatcgcgaatcgtcgatagacggtgcgcgatggcaatacttgtacgtccttgacgtaaccgagcgagaccagtttgaatcatcgattccgtttccgtatcgatattagccgtcgcttcgtccaagaccaagattttaggatttgtaaccaatgttcgcgcaaacgaaattaattggcgttgtccacttgaaaattgggcgccaccttcaattacacgagcatgatattgaccagataattgttcgataaagtcatcagcttgcacgaattcagccgctgcgcgaatttgggcatctgtaatctcttgattaaataatcgaatatttgatgcgacatcaccataaaacatgaatgcatcttgtagaacaagccccatcttgcggcgcagttctgctgtctgaaaactccgaatatcatgtccgtcgattagaatctgaccttcataaaattcatagaaccgcatcatgacattaataattgaacttttcccagaaccggtatgcccaactaaggcgacagtttgtccaggttcaacaacaaatgagatgtcatgcaaaatttcatttttcccatcgtatgaaaacgaaacatgcttgaattcgacgcgaccctcagtaatttcatttgcagcatcggcattttgagctggcgcatattcttcttgatcgagaattctgaaaattcggcgaccagcgaccattccatcttgtaatgatgataaagaatccatcatattggtcatcggattaaagaagttcccaacataggttgtgaacgcataaaccaaacccgccgtgacaaagctatgcagggctgagacaccaaacaagctcaagacaacgaccaatgccagtgtatagagtaaattcacaattggtgcgagcaacaacgagttcgttcgaatcatcgcttcgcgcgtttttaaatagtccgcgttaacttgttcgaattcgtcggtcaaccgtttttcctggcggaattgttggataatcgtaatcccttcgattgattcgttgagtttcgtattcaactgactcaatttttcacgcatatgccggtaaacccgcgcactgtaactactgtaataccagataacaattaacaatattggtagaaacgctgccgttgcaagggcaatttttggtgaaattaaccacatcgcaatgaacgctgaaatgattgaaaatgaaccgactaacaaggataagaaaacattccaataatcaatcaaagtcatcgtatcattcgtgacccgcgatacaatcgagcctgctggcgtctgatcgaaataacgcatcccgagttgatggagcttctgaaataaatcgcgccggacatcttccatcgcgcgttccgaacccattccaaaaaggaaagattggaaaaattgtgtaatggctttgagaatcacgcctaaaccgtacaacgccgcaacccccattaaaacttgggtggtcgcactctgattggttaagtaacgatccataaagacttgtagtaatcgtggtaataaaatattgatggtcgctaaacctgcggcggccacaattgcgccgataaattggcgtttatagcgtttcgtataaccaaagaggcgtttcatgatgtgcaattgctctttcaatggaactttcttggaccattctgattgatattgcttggccatcttatgcacctcctaaggcttgacttaattgttgcttcaaccacatctctgcgtaccagccatctgcggcaaggagtgcttcgtgtgtcccacgttcagtgatttgaccgtcatccatgacaatgatttcatcggcgtgcatcacactactcaagcgattagcagtgataatggtggtttgatcagcccgcatcgttttcaaattcattaaaatcgcttcttcagtctttgcatcaacggctgatagcgaatcatctaagatcagaatttctggatcagtcataatcgctcgcgcaatcgcaattcgttgtttttgcccaccagataacgacacaccgcgttcaccaacgaccgtttcataaccttggacaaacgttaaaatatcatcatgcaccgcactcgaaatcgcggcatcttcaaccgccgcttgatttcggtcaaaatcagcaaaccgaatattgtcgcggacatccgttgaaaataagaaattatcttgtggcacatagccgatactatcaagtaacgcatccagcgaataatcccggatatcgtgaccatcaatttgaatctcgccttgatactgatcatattcacgcaataataatttaatcagtgtggttttacccgaaccaacttttccgacaatgcccaacgttttaccttgtggcagagtgaacgccacctgtttgagcgttggttgtttttcgccagggtacgtaaatttttgaacagcataatgaatatcgccagttgctagtgtttgaatcgcatccggtgcttcgacaatggtgctggtttctttcaaaagttgatcaacccgatcataactcgcattgccccgttccaagacgttgaacaagcgcccaatcgcaaacattggccaaacaagcgccgcgatataactaatgaacgaaatcaattgaccaatcgaaatgctgtgattcataaccaacgtcccgccataaatgattgttacaatgtacgttaacccgataatcaaactgatggcgggatcaaataaaccatcaatcatattcacacgtttattaatcgcaattgtcttcgtgacaatctcgttgaaatctttaatatcagcttcttcttggccaaacgtttttaagactttaatcccagagacactctcttgggttttatcattcaaccgtgaaaaagccgcctgtgattgcccaaacgctgtgtgtaaatgtgcacctaaccgtcgtgacgcaacggccaacaagggcattggaatcaaggccatcaacgttaagcgccagtcaacgaaaatcaccatcgcaataatcgttgtcccaccagtgatgattgaatcggcaaaggttaaaataccggcaccagccacttgttgaatcgcggttaaatcattcgtggcatgtgccatcaagtcacctgtccgatgtttttggaagaaggtcgtgtccatcttcatgaaatgccagaacaatcgactccgcaatgtccgttccagtttagccgcgccaccccaaatccgggtccgccaaccatagcgaaaaatatattgtaaaatcgctgcgcttaacaagacgccgagccacatgattaatttttgggccgttaattgtttggcatccattaaatcaaccagggtcccaatcacttttggtggcacaatttggacaatcgccacgaggactaaaaagatgacgccccataaatagcggcggtattcttgtttaaaataccaccctagttttttaaaaattcccatgttgtgctcctatcctctaaaattcgataagtcctattataacaatcttaattaagccggacaatcatttgtatttccgttcttattatgataaaaaaagagcttctaacaaacgacttgttcgttagaaacccttttaaaaccgacttgactgttttattttttgttgctacgtttttgttgtgctttcattgagctcatcatctgatttaatttcttttcagatggtttttgacccatttgcatcatcatagcctttaacatttcttcgttaattggtggattgtcttggaaatacttcttcatgtaagcacgtgcgccaaagaaaccagcgactgcgcctaataaagccccaatgacaaataataaaatgcctaatcccatatcttatgcaccccttcctaattcagttcacttaaatagtttacacataattaacctaaaaagaaagcggaattctaagattaatcgtcacgcaagcctttttcccgttggatatccttcactttttcaggagtgacttccttaccttctttgtcatacacttgtagcatctcaacttgtgagcggaaactttcgcggaaatcctttaaataggcatcgcgcagtgtttgacgttctgctgtttcagcttcagttagtccttcagcttttgctttgtgtgctaattcattaattcggtctaatcgtttttgatccattgccatcttgttgccctccaattcaaactatttgtctattttggactaaaatccgtaaaatgtcaaaaaacacgaacgcttgtttgaaatcccgctataggtatgctaacatatagctattagaacaaatgaggtgctcttatgacgagaacagaatccaagcaattagaggtcttgcgttttatccatgaccgcgttcaagataaaggttatccgccaacggttcgtgaaatttgcgaagccgttaatttatcctctacttctaccgttcatggccatttagcacgccttgagaaaaaaggctttttacaaaaagatccgactaaaccacgtgccattgaattaacagcagctggtttgacagcaattggcgcatcacagaagaagattccggttctcggtgttgttacagctggggtgcccattttagcggttgaagaagcgaccgattatttcccgattccaccaagtctacaaactgaacaagatttgttcatgttgacgattcgcggcgaaagtatgattagtgccggaattttagacggcgatgaagtgatcgttcgtaaacaagcgactgccgataacggtgacatcgtgattgcaatgactgctgaagatgaagcaacttgcaaacgattcttcaaggaacctgatcattatcggctacaaccagaaaacgatacatttgaacctattattttgaatgaagttagcatcttaggtaaggtcgttggcctataccgcgacagaatgtagctatcaaaaaaggattcgccgttatggcgaatccttttttagcatgttccttcagccaggtccttacgtttagcgactgactgacgttacattttttcttaacgtgctttctgatgcaatttcttccgtctagccacgtcccgcaaacaacccgattgcatcggttattcaccaacctaagttaatgatcagactctcccagcttagaaagacatccattaataatccattaatttgaagatatcgtagtctttaattttttcgcgaccgtttaaatcgtttagttcgattaaaaaggctgttccgacaacaatcccacctaattcttcaaccattttgatggttgcggcgattgtgccgcctgttgcgagtaaatcatctgtgaccaacactttttgaccgggtttgaccgcgtctttgtgcatgtataatgttgattcgccgtattccaagccgtaacttgctgagacggtttcgcgtggtaacttcccctttttacgggctggtgcaaaaccaacgcctaatttgtaagctactgggcagccgacgatgaatccgcgggcttcagggccaacgatcatttcgacccctttactctttgcgtattcgacgatcttgtcggttgctgctgcatatgcttcaccatcagacatcaaaggtgagatgtcacggaatgtgacaccttcttcagggaagttgggcacacttgcaacgtaatctttaaagttgattgccattttaaattcgctccttaactctttcaacagtttgctactgattgaatcctgccagccagtctttcatctccgcgaaggttgagtaaacaagctgcttttccatgtcaattttagctaatcgttgttgataactcggtgcactttctaatgcgtgcttttccggttgttccgcggccgaaatgagaccacattctattttaacaaatcctaagtcaaaaaacacctgcaacataaaaattaatagcggcaatttaatttttagataagtcgctaattcccctaaccgtgctttttcaattcctggatgttgacgtaggtaaaccaagaaagtcgcaaactgtttcttatcaggaataccatcaagatatgccgaatacttactatagaagataaagctgattttagtggcctgttgttggcgataaaaggcttcaaattcatctaaatcagttggttcatcaaccacaatcaattctgcttgctgtgcgacatcggctgctaagatggcttggctgccggctgggatataactttgtagctgtgccagatgcttctcattgaaaaagacataggtgccactagctttaaacaactgttgcgtcaaccgattactccgttgatcgattaacacttgcccactcgtttgtaaatctttcagcatcaattgcaacgtcgtattgccgcgccaagtattctcacttagttgaccaactaatttcaactgttccaccgcttgtaaatcgtcgtacaacgcaccacagttaaatgctaagactgctaactgcgcttcttgatcaaccgccgtaaatttcaaatgcttctgatccgcaccgatctgcttcacattggtgacggatggcaccgtcatttcaatcaaaggttctgggttatccgtgccataaggagctaattgactgatggcttgataaacatcgggcgtcacatcagctaatgcgagctgtaaatcaaccgccaatgtgggtttcgttgttaaatcaatctgattatcagcggcataagtattcatcgccgtttgtaaagcagccaattgatcgactggcatcgttaagccgacagccatatgatgcccaccaaagtgcgtcaacaatgtgcgttgggcatcaagcgctttaaagagatgatatgcttcaacacttcgtcccgatcccttggcttggccagttgctagatcaattgctagcactaaagttggcttaccggtttgttcaacgatatgactcgccacaatccccagcacaccttcatgccagccttcatgtgccaacactaaggtcgcactagcttggttctcaggtgtttgtgccatttcgctagctagcgcagtaatttcttgcacaagaccctggcgctttttattttgttgttccacaaattgggcctgttccaccgcttgttcttcatcgaaagtcgttaatagattaacacctaagttggcatcacctaagcgaccaatcgcattcaaacgtggcccaatcccaaatccaatcgatgtggcgtcaagcgtttcttgttcaatacccgctgactggcaaagagccactaaaccgggacgactggtattttgtaattgttgtaagcctaagctaactaaaacgcgattttcatcagtcagtgacactaaatcacagaccgtcccaatcgccactaggtccaaactctcgtaagggatttcttccaataatgccgtagcgactttaaatgccaccccaaccccacataaatcactaaagggatactgtccctctggatgacgggggtgaatgattgctgtcgcatttggcaatgtacttggtagttcatggtgatctgtgaccactacatcgacaccgtgttcttgcgcataggcgattggctctaagccactcaccccgttatcaacggtcacaatcaactgggtcccattttcaacgagttgcttatagacatctaaattgggcccgtagccatctttaaaccggttgggcacatatacttccacatcggcgcctaaactttcgagcgtctcttgcatcaaagcggtacttgtaatcccatcggcatcgtaatcgccgtagactgtaattttttcgccgcccatcacagccgcttggattcgatcgactgccgtttgcatatcatacaaagcgtatggatcatgtaattgaccgacattcggatgcataaacgcactgattgcctcaggtgttttgattcctcgttgccacaacaattgggctgcggctttcgggagtgcttcaactgccattattgcttgtaagtcttggtcagttggtgttgcttttaattgccattcatattgtgcttccacattaatccctcgctacttccaaatcattaacttacccattatagcaaagattattatatttcgtttaataatccaatcaatgcttttgtttatcagtccaaatgatatactgttaattgatacacaaggttattacatagggggaaacaaccatgacagttttagtattaggtggcgctggctacatcggctcgcacaccgttgatcaattaattcaacgcggcacggatgtcgccgttgtcgacagtctcgtcaccggccatcaagccgccattaatccacaagcgcgcttttatcaaggcgatattcgcgacaaagatttcatgcgcagcgtcttccaacaagaaaaagtcagcggtgtgattcatttcgccgctttctcaatcgtgcccgaatcgatgcaagcaccacttaaatatttcgataataacacatacggcatgactgccttactcgaagtgatgaatgaattcgacgtcaaacacatcgtcttttcatcaacagcggccacttatggggaaccgaaatcaattccaattaaggaatccgacccacaagtcccaactaacccgtatggtgaaagtaaattaatgatggaaacgatgatgaaatgggctgacagagcttacggtattaaattcgttgcattacggtacttcaatgtcgctggtgccaaaccagatggttcaatcggtgaagatcatcacccagaaacccacttgttaccaatcgtgttacaagtggctgctggcaaacgtgaacaactctccatctttggtgatgattatgatacaccagatggcactaacgtccgcgactatgtccacgtgttagacttagccgacgcccatattttggccctcggttacctcgaagaaggccatgatagtaacgcctttaacttaggctcatcaactggtttttcaaatatggaaattgtcgaagccgctcgcaaagtgactggcaaggcaattcctgtgacaatggcaccgcgtcgtgctggtgatccaagtactttgattgccgcaagtgacaaagcacgcgaagtcttaggttggacgccacagtatgacaatatggaagcaattattgaaactgcctggaattggcatttaaatcatcccaacggttatacagaccgcggttaatgatgaaggaacacgccagaaattctctggcgtgtttttttgtggcctaatttggacatgcgtcattgtttttgttataatgaaaccaccattgaggaggcactaacttatgcaagtattgattcttgttttaacttatctaattgccgttgaacacatcggtatcatggggctggaaatgtttgccagtgctgaaacaaaggcgaaagcttttgacatgccgctggactttgtcaaactaccaaatgcccgcgtggcactggccaaccaaggcatttataacggaatgttgggcgccgtaattatcatggtcaacctgttattagccggccaaacgctcaagattgtcctcgccctattaatgctctacatcttcatcgttgccctttacgggacatttaccgccaccaagaaaattttcttcttacaaggcttacccgctttaatcacattattgttaatcttattcttctaaaaaagagctttaatcatgacaaatccaattctcatcaccaccaccgaaactattcctggtaaaaaatatgaagtgctcggtgaagttttcggtttaaccactcaatccaagaacgtcttcaaaaacatcggcgcttcattgaaaaatgtcgtcggtggcgaaatcaaagcctatactgaaatgatgactgaatcacgcgatgtagccatcgaccggcttcgccaaaatgcacttgaaatgggcgcagatgcggttgtcatgatgcgctttgattccggttcaatcggaacagatatgcaatcagttgccgcttatggcacggctgttaaatatatcgactaacaaaaaaagatgaacggttccctgatattcaggaaatcattcatcttttttaatttacttattaattctaatcaacaacttaagccgctggtgctgcgggttgtgcgctatttaaagtccacgtaatgttgctcgagaatgtatcaccagccgcaagttgaatacttggattggcacttaatgctaatttcccagcaacttgccatgttttcgacatcttatccgtcataatcggtgtttcagtaccattatcagataatcctacgttcgttggcaagccagtcatattaatggctgtgctgcttaattgtttgcctgtggttgatgccattttactcatcttcgctgtcaatttccaacctggcgttgctctggtatccgtgattttcaacccatcactgacctgatattgcttgtcctgagcagttgtaccaacataaatatcttttgataagacgttcccaaatctaaagctaggcacttgatccaatgacaacttaccaactgctggttgcgcttgtaattcagcttcgttagaaacaatcgtaactttttttgaacttccacttgattcttccgttacgttagtcgttaatgttagctgtgctcgataactctttccagccgtagttgcagctgcagcatctttcatgaaagtactatctttactaaaggttagtggttgttccgtatttaagttcgctaaatttgtaatgtcacccttaagattagaaacaccactattagtagcgggggttattgtcttatcctcaccatctgtaaattgccattcataatgccaattactcgttgaaccagatgccttagctaggtctgataaaccatcaactgaccaagtcccaccgagattcgccgctttcttgtaggctgctaacccaccaacataaaccgttttctctttagagacattctttgcagcaattttatatttagctggaatccctggtgtattcggatctttattcaattttccagtataatacgaatctggcttatacttttcaccctccacatcaatcgcttcgttaactttattcacttatttcgtgcgtttaatagtaaagtgattaagcagttggtgcagttggtgttgttgatgaaagattccaattaattgttgttgtgaaactctcatctttagctaaatcggctgctggatttgctgctaatgttaacgtagctgcttccatcttgaaattatcgacaccatgtttcccgttacctttaaccacttcaacggcaggagaatcgtccttaacagcacctgttaaagtttcaccaagtgaaccagtagaatctaaattcaatattgcgcctgttagtttattagcatcatctgtgaattgagccatgtcagctgtcaacgaccagtcagatttgcctaaacgtatatcagcaatttctaaagcgccagctgttttagcaactttaccagtaaagccagcataaatctcactagcttcaattgtcccaaagctgaaacttggtactgattttaatactaatgtcccattttcaggatctgttgggtttgttggatccttagcaacaacactaaagtcggcttttgatgtttgcggagcaactgcgtcagctgatactgaccccactgtcattgctgttggtgctaccattgttgctaatgctgaaaataattttgtcttcattgataattcctccaaattattattaattacatttaatatagtagcacgcaattcaattgccggataacaaaaaatagataccatacggtatctatttttacccttcactaattattcgttaaaccgattccaatcctgtcctagcagttatttccccattaccattcttctagtgtaaacagcttgcccggaatgcatgaccgcatcatccacgattgagactaagcgtgcttcacgggtaactgccggtgtccaattttcatcaattatctctaataaagactcgtcagtaacttcagccaggtaatcaagcgtcaattgcaatgcgtctgctaagtaaccaattaataatgctttatcgatgataatcactttggctgcttcttctggtgaatgcgaccaatcttgcgtttcatcaggtagatctaatgcaaatttttgtgaccaacctgcacgtatccacaatggttgtatccctttcaaatccgcaatctgataatccatttcacgggcagtatgccatactaaccaggtcaccgatttaattagtggctgcggcattgtattggcctcagccactgtcatttgttccaatgtatcgagtaatcgttcttgagcgcgttcgaccgttgcacttaatagttgcgttgcatgcatcttatcatcctccatatctaaaagttaaccccattgtatcattaaaccactactaggcctttttttatgaatttaccaaaccattacgaagctttacactttattttcactagaacaacaaacactttacattattgtttatgcttaaccttgtaaagaataaaaaatcgttttacaagaagcaatcaatatgcgcatgagccaaacaatcatcccttacgtggcaacaacaactttattacttttggcagccggctgtaccccacaaaaaaatactaaacaatcgacagctcatcaatccacccttgtccctaaacaaaacatgagtcgccacattcaattagccggtgcgattaatactcgtgatctaggtggaattgtcacgaaaacaggtgccagaattaaagccaatcggttaattcgttctggtgaattagctggtttaacaacgaaggataaacagaagttaaccgttggaaaacaattaaataacatcgttgatttacggactagtagcgaagttgcggctaaacccgatcccgctttaagcaacgtccactacaatcactatgatgtcaccaagtctttagggacttcggcaagtcaagctgactttttcaagaatctcgataaggttgatggtgaagctttcatgattgatattaaccaaaaattggttactgatcccgcagcacgcacgaactataaacagttctttaatgtcttattgaataataaaagtggtgcgacactttggcattgtacagccggtaaagatcgtgccggattcggtactatgttagtcctcagtgccctcggggttgatcaaaagagcatcatggacgactacctcgcctctaataaatatcgccgcgccgaaaatgaaaagacaattgaacaaattaaggtggcaactcacaataaccccaaagccgttaaaacgatcactgcaatgatggccgtccgtaaaccctatctacaggccgcatatgacacaatgaacaaagaatatggtggcgttaatggttatttgaaacacgggctgggtttgactaaggcggatctcaaccaattaaaaacgatgtatcttaccaagagttaatgcttcatcaggtagattcactattctcgtctctccatttttttggtatactgctccttagaatcaatcagttaaaggagcctcatcatgtcacctgctcaacatctcattttattattgatcgtgatcattgctgcaatcggcgtcttaagttcatcagtcatcttattcatcgcccaacaaaagaaaaatgaccaacttaagaagaaatcgaatgtgctcttttgggtcagcatcctcgtgatgatgatctttctgaaactaatcgatatgcttcaataaacaccaaaaagcatgccagtcaaatttgactagcatgctttttttgcaatctatcttctaaaaaaccacccttaattctttgctaagttacaaaacttggtctaagcaattttattgttccccacctttgaggatgttatcttaactactaaaggaggtgtcactatgaaaaccttagacaatatcgcgcttactttattaatcgttggtggtttgaactggctacttgtcggtctattcaaattcgacctagtcgctatgttatttggcggtcaagcagctattatttcgcgcatcgtatatgtccttgttggacttagcgcattatattgcattaagttatttgcacccatcaacagcgcgcagcatgaatagctttctggagcggctttttatagggaccaaacatcctgctcgtctcaatcgctatccattaacgtgttggtaaaactgttatttcttttcaataacgcaaaaaagcgtgctagtcagcctcgactagcacgcttttatttttttatttggtagattgtaaaattaatccgaacgctgttcggacaaaaaagatcagcttcctttaaaatggtgtttaccacaaacccatcttttaggagctgatcttttgtctagtataacctattccgaacgaattaaaatcgaaaccttttgtgaactagggctatccaatatccaaatgggcgttcggctgaaccgatcaccgtcaacaatttcttatgaattatctcgatgtcaaccttatcaggctgaattagcacaaacagatgccgaatacaagcgatcacgatgtggtcggaaaactaagctgagcgatgagttaaagcaaaaaattctcaaccatttacgtctaagctggtcaccaggaatgattgctcacgaatttaaactagctactaaatctatttataattggctaaatcaggggagaattggtttctccttgaatgatctacctgaacatggcgtacgccaacggcgtaacgttgaccaacgatccaaatataatcaatctttggggcgatcaattgaacagcgtcccatgatgattaatcaacgtaatcgcatcggcgattttgaactagatacagtcgttggtcctcgtgggcatagtaaggcagttttattaactttaatcgatcgaaaatcacggttcctttgggcataccggttaaaagatcggacgacagcgactgttaatgaagccctaaataagtttctagcaacttttaatggcccggtgcatagttttacggtggaccgtggcactgagtttagtgggctagtatcacttgaatcacaatatggtattaagacctattactgccatgcttatacgccagctgaacgtggtagtaatgaacgctttaatcggaatttacgttatttttatcctaaagggactcgttttgagcacattagtgctcaagatttaacgacgacgttactccaaattaaccagcgaccgcttaaaatactcgactggcaaataccgtatcaggttatgctgacaaatttgtccaaaaattcggattaaatttgcaatctaccatttacctttggtatcttcatcattcatcttcaaaatggacatgaacgcctctaatagacacgggctcctatgatggaattacggacaaactgttcgatataatacatcataaaggagctttttattatggcaattaaatattcaaatgaatttaaagaatcgattgttagcttaagtcagactggccgttcggccaactcactggctaaagaatacaacgtcagtgtttcaacggtcactaagtggattaaacaagctgatcctaacaacactaaagtgctatcatcaaatgaacgtgctctgattaaagaaaataaacggttaaaagaagaacttgatattttaaaacgagcagcggtgctcatggcaaaaagctaattattaaagggcgtgccctcgtgttagaagtcgtcaacgctaatttacttgctgggcaccgcattacgcgtatcttatcagtactcaaaattccgcgctcaacctactatgattatctacattggcagccaagtagaactgaacgccgccggcatttaattaaacaagaagtgttaacggcttggttaagatatccaatgtatggctacccacgattaacgatcttactaaatcaacagtctgatattcacgttagtcagcgtctggtctatcaacaaatgtgtgaattaggaattagatctagaatggttaaacgaatcaataagccaaccactcagactgattatgatcagcgaccaaacttgattaagcagttaactgatcaatctggtattttattgactgatattacgtacattccccttaaccatacttggtgttacctagctagtgtctataatccagtaacccgacgggttattgcttaccaacttaatacgcagatgactaaagaactagcgactaacgttattacccaagtcatggcgcaagcagttaaaccacaaattattcatagtgatatgggaagccaatacacaagtgacttatttgaaaacactttatcgaagtatggtatcaagcattcttactcccgaaagggtcagcccggcgataacgcgcgaattgaaagttttcattcaattttgaaacgtgaatacgttaatttccaagattttaagacaattcataaagcaatcgccggaattgataactatattcgttggtataacagtgatcgtatttcacttgtagcgtagctacaggctattaaattcaataatgttggggcttatttaatatactctaaagcgtttttaaaatctgaacgggactaaaacttcggcctctgaaaattaaattaagtaatttaaattgaaagtcaaatttgttcgtacttttatgtccggattcttgacataggagccctacgtaatcgccaatatcagcgaatgcttgtttagcgtactctttagcgatatcatcagctgtaacgaataggtcgttagcaatctcgttacgcagcttatcaatttgctcacgcacactagcatttactagcaaccttgggccatttacattagcggtcttgtaatcaacgtcataagcttgcatataagcccatgtggcattgaatcgttgcagatagtacaagcagaacattttctgttgatcgtttaacccatcattagcagataattccttcactattttgggtgcaaccttttcaactttgtgtgcaccctttttgcttttggggtgcaccgcttttttatttggcccacgttcccatccattacgctgtttccatgatttcacggtattaatcgacacatcatatttatcagcgatgtctttgtacttcatcccagataaatagtcttcctttgcatcatttcttgattcatcatgcattacatagcaccgccctccttcttataattgtttttctccaataaaatacgccgctcattatctgaacgacgtttctcatctatcttcttctgtttaagccacttctctaaacgggcatctgctgccgtccattcaggtgtttcgtagccgtactttgaatgtattagtttcacaatgcctatcactcctttaattttatggtagattgcaaatttaatccgaatttttggacaaatttgtcagcataacctgatacggtgtttgccagtcgagtattttaagcggtcgctggttaatttggagtaacgtcgtcgttaaatcttgagcactaatgtgctcaaaacgagtccctttaggataaaaataacgtaaattccgattaaagcgttcattactaccacgttcagctggcgtataagcatggcagtaataggtcttaataccatattgtgatccaagtgatactagcccactaaactcagtgccacggtccacagtaaagctgtgcaccggaccattaaaagtggttaggaacttagttagtgcttcattaacagtcgctgtcgtccgatcttttaaccggtatgcccaaaggaaccgtgatttgcgatcgattaaagttaataaaactgccttactatgcccacgaggaccaacgactgtatctagttcaaaatcgccgatgcgcttacgttgattaatcatcatgggacgctgttcaattgatcgccccaaagattgattatatttggatcgttggtcaacgttacgccgttggcgtacgccatgttcaggtagatcattcaaggagaaaccaattctcccctgatttagccaattataaatagatttagtagctagtttaaattcgtgagcaatcattcctggtgaccagcttagacgtaaatggttgagaattttttgctttaactcatcgctcagcttagttttccgaccacatcgtgatcgcttgtattcggcatctgtttgtgctaattcagcctgataaggttgacatcgagataattcataagaaattgttgacggtgatcggttcagccgaacgcccatttggatattggacagccctagttcacaaaaggtttcgattttaattcgttcggaataggttatactagacaaaagatcagctcctaaaagatgggtttgtggtaaacaccattttaaaggaagctgatctttttgtccgaacagcgttcggattaattttacaatctaccttatgtacaaaaaaagacagcctaagctgtctcaagataaactcttttaaaattgtacgcctaatgaacctaagccagtcgcattccatttgtatccctcggagcgagcaatccgcatcaattttcggattcgttcagcgttttcattacccaataagttcttaccattcatggtccaaattgtaattccatttacggttttagctgctaccacttgagctggcatatcttctgtagataaatgttttgctgcaattaaaagaatatccttaatatgctgatcaatttctttgtgggccaaatcattatacatttcatcaattatttcgaaaacttgctcattaatagtctttgacattatatcaccttccgttaaccagaatataccacaacttcatgtttatgtcgctacttccctaatgattgtaattgcatttcactttattaaaaaagttttcaaatatctctttattgattttcgtgatgcatcatcacatcaattacacgtcgtattgacatccttcattaccttaagcagttgttgcaactggtccttcttctgctttcttctctttatctttcttctgtttccgaattttatcctttgcgcgcttataaacatctttgggactaggaagcccaaatacataaactaccatgatatcccttctttcttactttaattgtagactcaatcttacagtactacaaatattcgggattaaaaaagacagcctaggctgccttgataatattaatagattaatttatatacctctttgcccgaatctgttaaagtttcttgtactgcatttttaccgccaaacgtgccagacgccgtgaaacatagtccatttacttctaactccttgattgctagtcctaatgatgttattgaaatgtcattaaatatttcagtttttaataatccttgtgcaatatactcactgttatcaccgttcattattcctccaacagtgatgcttgctttattgggagctttcataatcggccatctattagctttctgcaatactaagagtgcctgtggtgatagtttggcaatcatagacaacacaactctcttatttgaaaagtgttcttttaaatcactatcattacttatattccttagaacgttggctaaaacatttaaggtatcatcatctgccggtgaatcattaagtatttctattaattttgaatataatgtcagaccatagggatccgtaattaagtcaacaatacattgtaacgctttatcgtggtcgtctgatttttgtacataagaagcaacgaccaaagattttttcatatcagatatgttttggcctagttcatcgccagtttcaatcacatcaaaaataagactccctaaagacccatttaatatatcaacaaccaattctcgacctttagattttcctgtatcgattgcagcctctgcatactcatcagctgttaacctctgttgctctattctttgcttaagcgtttttttatcagcctttaaaattgattctggattattgatcatttctaacaaactttctctatccataattttcaccctccaataaatctataatacaaaaccccagccataaaggctaggactattggaggtgaagtatgtgccattactggcaatatcgcaggtgtggatttgcaccacacaattgccgttttaaggcgtaaagacgctttacctattccgccactgcgataatatcctagccgggactcgaacccgaatcgtgaccgcaggtgcacttccgcgctgctctatttaagctactaggaatggttaggtccgcgatcatccacggcaacaacgtgctaaccccacgcttccagcaattagaattgaagtcgattaacctaacaaagtttgattaacgctaattgccgggtataacagatcgtatttttggcaacagcgcgaccaccgttttccgccggtgattactggccacagtttaagcgcgctttactaataatccataatactaatttatcacggaaatccggctaataaccacagacaatccgcacaaaaaccgcactttttatttcttgaactcgtgcaagtcttcaatcatgaatgcatctgcaaattgcaggcatgcccgattcttataatatctgaatcgagtttcaccatacccgctttcaagctgagctgctgttacagtgttttcttttacatagatactccatagaatcttcggctcctatgtcaagaatccggacataaaagtacgaacaaatttgactttcaatttaaattacttaatttaattttcagaggccgaagttttagtcccgttcagattttaaaaacgctttagagtatattaaataagccccaacattattgaatttaatagcctgtagctacgctacaagtgaaatacgatcactgttataccaacgaatatagttatcaattccggcgattgctttatgaattgtcttaaaatcttggaaattaacgtattcacgtttcaaaattgaatgaaaactttcaattcgcgcgttatcgccgggctgaccctttcgggagtaagaatgcttgataccatacttcgataaagtgttttcaaataagtcacttgtgtattggcttcccatatcactatgaataatttgtggtttaactgcttgcgccatgacttgggtaataacgttagtcgctagttctttagtcatctgcgtattaagttggtaagcaataacccgtcgggttactggattatagacactagctaggtaacaccaagtatggttaaggggaatgtacgtaatatcagtcaataaaataccagattgatcagttaactgcttaatcaagtttggtcgctgatcataatcagtctgagtggttggcttattgattcgtttaaccattctagatctaatccctaattcacacatttgttgatagaccagacgctgactaacgtgaatatcagactgttgatttagtaagatcgttaatcgtgggtagccatacattggatatcttaaccaagccgttaacacttcttgtttaattaaatgccggcggcgttcagttctacttggctgccaatgtagataatcatagtaggttgagcgcggaattttgagtactgataagatacgcgtaatgcggtgcccagcaagtaaattagcgttgacgacttctaacacgagggcacgccctttaataattagctttttgccatgagcaccgctgctcgttttaaaatatcaagttcttcttttaaccgtttattttctttaatcagagcacgttcatttgatgatagcactttagtgttgttaggatcagcttgtttaatccacttagtgaccgttgaaacactgacgttgtattctttagccagtgagttggccgaacggccagtctgacttaagctaacaatcgattctttaaattcatttgaatatttaattgccataataaaaagctcctttatgatgtattatatcgaacagtttgtccgtaattccatcataggagccgtaactttgtgtgcaccgaagaaaatggtacccccgtccttcctaactcgattaaatataaggcgcaattagtccaagacaaattgcataagaattttaatttccattcactacgtcacactcacgctactatgctgctagaagccggagaaaaaatgaaagtcgttagtgaacgtttaggccattctcgaatcagcactacaatggacacttattctcatgtcactcataaaatgcgcaaaaatacagttagtctgatcgaacaaattcagaacgagtaatgttggcaagagcactatcttgaataattcgaaacacaaaaaaatagcagttttgccaaccaacgaaaattgacgttggcaaaatgttggcaaaactgctattttatcactattaaatttttaagaatccttatttaccggctttatcttcatcattcatcttcaaaatggacatgaacgcctcttgtgggacttccaccgaacccacggatttcatccgtttcttaccggctttttgtttttctaacaacttacgcttccgggtaatatccccaccataacacttggcgagcacgtttttccggtaggccttgactgttgaacgggcaatcactttattcccgatagctgcttgaatcggcacttcgaattgttgacgtggaatggtttctttcaacttaccaacaatcgctttgcctcgttcaaaggcaaagtcacggtgcacgataaaactcaaggcatcaacggattcaccgttcaatagaatatccatcttcaccagatcactcgcacgatagccagtcacttcataatcgaatgaggcataacccttggtattggacttcaagtcatcgaagaaatcgaaaatgatttcagacagtggcatgttgtagatgacattaacccgataggtatctaagtaatccatcgtgacgaattcgccgcgtttacgttgtgcaagttccatcacagcccccacataatcgttcggtaccatgatagatgctttaacgtacggttctttaacttctgaaatatttgatgtttctggcatttctgatgggttatcaatcacttcttctgtgccgtcggttaaatcgacatgataatccactgatggtgcggtcatgatcaggtcaagattgaattcccgttcaagccgttcttgtacgacatccatatgcaagaggcctaagaagccacaacggaacccaaagcccaatgcttgtgacgattcaggttcgaattccaacgcggcatcatttaattgtaatttttcaagggcttcacgcaagtcgttaaacttcgcgttatccacgggatacatcccagaataaaccattggttgaatatgccgataaccatcaagggcttctgctgccggattgtcagcaagggtgaccgtatccccaacccgcgtatcttgaatggtcttgatgctggccgtaatataacccacatcaccaaccattaagaagtcgcgtttaacggctttaggcgacatcacaccgacttcagtgacttcgaattctttcccgttattcatcaagcgaatcttatcgccgactttaacagtgccatcaaaaacccgcacgtttaacacaacaccccgataactatcgtagatcgaatcaaaaatcagcgccttcaatggtgcttttaaatcacccgttggtgctggcacgtccgttaccagtttttctaggatttcttcaatcccaatcccgctcttagcactagcaagcacggcttctgaagcatccaaaccaatcatctcttcgatttctgctttaacaacgtctggttgtgcagatggtaaatcgattttattaatgacagggacgatttctaaatcatcgtcgaccgctaaataaacgttggctaacgtttgtgcttcaaccccttgggccgcatcgacgactaataaggcgccttcgcaagctgccaaacttcgtgacacttcgtatgaaaaatcgacgtgtccaggtgtatcgattaaatggaaaatataagtttcgccatctttggcatggtagtgtaattccaccgcgtttaacttgatggtaatcccacgttcacgttctaattccatgtcatctaagacttgcgcttgcatatcgcgcttggcaatagtatccgtcatctcgagaatccgatcagctaatgttgatttaccatgatcaatatgcgcgatgatcgaaaaattacgaatgtgcttttgccggtctaacattcctgcgtaatccattaattgtacctacttcctctgactatcctttaaattataccaagcctgcctcgtaaaagcgaacgcatttaacggctttccaataaaaaagccaaaaccaaacggatgattttgacctttacttcattactaagtcctattttttgtcagctttttgcgccttttctttcttatctttattaggtgtcacttcactgacaaccttcttaactgtgccttcaattacatttttcaaactatctaatcgttcttcgtttgccatatcaatgacttcctttctattttgttcaccttcattctactttttaaccacaatgactgtcaaaaggttcgccttttattatctaaatgctataatttaggcaggcaaccaaatagattgttgcttaattaattgattggagttgacccatatgcaatttatcatgactttttcaaataacgaaaccgttactttttcggaaatggatttgctacatgcttggaagaatgatactacctatttaaacgttggtgatgatcaagccttttatctagatgaaatcttcaatggtagctaccaagacgccattgcaacttctagcgaacaacaactcgctaaagaacgcccaattcttgcattggctggtctattcgctgatgcagattggttaacttttgaaaccaatcctgaaaaatactatcaaacaaaagcaattgtttcactcacaactaaagattaaccgctaaaagcctaggtacgcctaggctttttataattgctttcatattatgtacaatatacaatcgttaagaactgttattcattactttggaggttattatgtcctatttatttttagcgttcttggggagcgcactgatttcactactattctttaaccggcaacgacccagaaaatggcgtcgcgtactgattatcatcatcgccttaatcggcttaggcggttcattaatgccggtggctgctgcgaattccaagaagaccagccaacatcaagttgatgtacgcgaaaacaaggcggcccgtgctaactcgagcgctttaaaaaaacaactagctacaaagaaaacagaggctagccaactgacaaaacaagttgccagtcaatcacgacttgttaaaaagcagcaaaaagcgtctgagtcagaaagagtccgtgcggcttcagcctcaatcgccgctactagtcaagctagcgaggccgctcagcaacaggctgcaattcaggcaagccaacaagcacaacaagctgctagtgctcaacaagttgaacaaatggtgacaattgcccctaattctggtaaaaaataccatcttgatcccaattgccgtggcttaagtcgtgccaacagtactacaaccatgccattgtcacaagcacaagcagaaggctataccctttgcggatgggaggattagccaatgaaagcaacccgtttgataagtcgcgtggtggtaacaatttcacttgctggtgtcggaacccttttgcaacaaccaactaccgttcacgctaccaccttacgtcaagaaaccaagcgcattaatgcgcacaacaaaaaaaccgaacgtcaaattaatgcgcttcaacgtaaaattaaccagttaaacaaaaaactcactaactatcagcaacaaatgcaaacgactggtcctgagcgtcataacacatcagagctcgcggccctcacctaccgtggtgaaaacgaggtactcgtcaataataaccaaccaagcttcagtgctactgatttggctaccgatcacggtggttggcaaacctttagtaatctcgacgcactaaatcgcgttggtgctgcaaatgttcttttaaatcaatcgatgatgcctactgccaagcgcgaaggactcacttggaatccgaccggttggcataataagcggattaaatctggctggctgtataatcggagtcatttaattggctatcaactaaccggtgaaaataataatccaaagaatctgatgacaggaacacgccagctaaacgcacccgaaatgctggcccatgaatcagatattgcttattatctcaaaaaacaccctaatcgttttgttcgttaccgtgtcacacctatttttaacgataatgagctgctagcccgcggcgttcaaatggaaggccaatccgtcggggataacagcattcaatttaacacttacatttttaacgtccaagacggcgttacattaaattacgcagatggcacaagccaaattgctaaataagctcagaaccacgataaattccttttatcgtggtttttgctatctaacattattgtcactagccatttaaaacttaataatatgagctaaacatacgataatgtacttacttaacttttagggaggctattatgcagactaaatcatatcaagttttaaataacttcgacgtcaaggtaattggaattatcctcatgtttattgatcacgtgcaccaaatgttcgccggggctggggtccctggctgggttgattggttcggacgaccagttgccaccatcttcttctttatggcagttgaaggattcatacatacgcggaatcaaaaacgttacatgttccaattactcgttggtttttggattatgaacttgggaagccccattgtccaacacttcttcgaagtcggtaacctcgcactgtcaaacaatatttttaccgatttatacattgccgttttagcaatgtatgggattcaagaaattagtgtcggtcgccgcacgcaccattccaaacaaattttgcttggtggactggcaattattgctcctatcctcttatcattattggcgcttggtctaattgctaaccctaagacaatgatgtttgctgccaatctcgcaatggttattccaaccattatgcttgcggaaaatggccttctcctctacataggagtatttttttatcttttccgaaacaaccggctcttacaatgtcttaccgttcttgttttcgcattccttgacgctggaatcaactccggatttgccttcactggactcttcactagcaatacgcaatggatgatgatcttcgcgattatcccaatcctcttgtacaacggacaaaaaggacgtagcatgaagtatttcttctacttgttctacccaattcacatttggttattattcattcttgcttcattaatgggcgttggcgaataaattattgattctctatgtaagctaaaaactgtaaaaaactcgtttaagtatgtcataatatctttggtaggaagttattaaatttatcataacttctcatctcgtccagaactgacgatgcgaaaagctgataaggagaagggggttttacatcatggttaaatcatatcaaagtttttggtcccggatttttgatttctcaggcacttcaaaccgacctgatttctggtggccaatcatcattaactacattctaggtggtattatcatcggtattattcaaacaataaccggccatccaatttcagaaatctataatattggggatttaggcatctcaatgggtcgtaacatcgtcgtcttcattgtttggattgcaactttatccgttaaaatgcgccgacttcacgatacagaccgctcaggctggtgggtactcattgaattcataccgcttatcgggacaatttggttctatatcctaatgctcttaccaacaaaaacaaaccgttgggcataagcaattaatgtaacagtcacacgtgtggctgttatttttttgcaaacaaaaaaggcgattaacaccgttacggtagtgttaatcgccttttgttaagcgcctaattctgcttaacaccttgttatctaatggagccggcgggggttgaacccgcgtccatgcgcattgccacgtcaatctctacactcatagtcgaacgatttaggagttcgctagtccaaaacgccgtccgacagaagctcggatgaactagctagtttgcaaatctcttttaaacacctcaaacggcagcgtttaacgtaacccaattaatttgagacccggatctaacccttgggtgaagtcaggcggatcacgctatgctggtgtttaggcagctacagcgtaagaattgttattgtttgcagttataattaactgtaacgttgttaacgtagacgtaacctacgaagtgcaactcacgctcacctacacatgtcgaatccgtaacggccccgatatgcaaatactagtttagcatatcagccagtaatatgaaagactttaaccctatttcaccactaagcgtttcttaggaaaccggtcttttaaaaaggtttgtaatttttctaccgtcgttttaaagcgcaacttggcaatccgaatttcaccgacataaaaacaagcttcgactaagtcaccttgtgttagtaattcaatcttagaaatcgctgcaaattgatgaatagtatttaagtttgcaatcaaacttgttttggttaaaccacgaggccaaaaagcaatcacaattaaaattacaacagagccgatacctgtgatttgatcgctgagcgttctgcccatcactaacgttaaacctagtaagaggattccagcacaacataaaaaaatcgtccatagtcgattccgttttgcacgccaaaccattttcgtttcaacaatcagccagataatgagcaaggcaattgccaataagccataaaataatgtaaaacctgtcatattcccattccctccactaaaaaatgaccagccatgcgctggtcattttcactgatgccttagacgtggccaatttcaacaacgtctctggcaatcattacttcttcattagttggtactaataatactttaacgcgagaatcgtcagcgctgatgacgcgttcttgagccatcacgttattgcgttctggatcaactttaacgccaaagaaactcaagcgatcggcgatgcgttggcgcattaagatgtcaccttcacccattccggctgtaatcactaggacatcaagaccacccataatggcaacgtatgaaccaacatacttgattaaacgattgacgaagatatcaattgccaattgtgattctggacgttcttcacgcgttttttcaagatcgcgcatatcaggagataatccagaaatcccataaatacctgatttagtattcaaaatatcgatcatttctgctggatctttaatgtttaatttttccattaaaaatgcaacgagtgatgcgtcaatgtcccctgaacgcgtactcattgtcacccctgcaagtggtgtaaagcccatggatgtatccaacgatttaccgtctttaatagcagtcactgaaacaccactaccaagatgcatggtaatcatctttaattcttccaatggtttgcctaacatttcagcagcacggtgggaaacataccgatgactagtcccgtgggcaccgtattttcgtgctccatacttgtgataatattccaacggcaaactgtaaagataattttcttcaggcatcgttgtatggaaagatgtatcaaaaacagcaacctgtggtacatcatgtaaaatcttgcggaaagcacggataacacctgcttcagcaggattgtgtaatggtgcgtattctgacaattcttcaatccgttttaatgacgcttcatcaattaatgcggatgacttaaagtcttccccaccggcaacgacccgatgaccaatcccactaatttcactatattcattgatgattttaaattcgattaacttcttcaataacaaatcaaccgcaacatcttgcgtcttaatatcctgggtcattgagaatttttgaccatccccgtatttaacggtaaagactgaatcggataatcctaaacgatcaaccatcccttgtgcgacaacttgttcttcaggcatgataaataacttccatttaagggtagaactaccagcgttaattgctaatacttttgacatctaatcaccttttctattcgattattgtaaattatctttatgccaagtccggatcttctgtagatacgttgcaaacgccttttgatcgttagaatttggaaattcacctaataaaatttggtccacttgtttagccccggcaccttgtttttgaaggactaaaattgctttttgaccttccttagtcttaaacaagtttgctggtaaactcaataagccttgcaaatagacatgttttgtcacccatttaatcagttgcttagcttcatccgtttccaaaatcacatttggtactaggaaaaagccatagccgccttctttcacataatgcatcgtttgttcaatcaacaagtgatgtgcatatgaatgaccactggcagcgtgggtttcaaaatcagccgcccgttcatctaatggataaaaaccaattggtagatccgcaacggcgatatcaactggtttaaccagtagcggttcaatcgcatcctgatggaaaaaggttgttgaatgcttctgcaattcactactgatgcccgcaatttccaacaaactatcatcattatcaaccccaaaaccttgcacggtattccccgttagtttttggatatgattgattacggttgccaataagttccccgttccaacaactgggtccaaaattgtcttgatttggtcagcaccaccaaaaacctctgccaaataagctacaagatagccgatcgcatctggtgtcatttgcttgtttggttccactttaacttgacgcaaacccttgagcgttgccaactgtaatgcttggcgaatttcttctgcttcaaattggttgagattaaccgccgcataaagcggttctagttgtgcaacagtggcagcatctggtaagccgtcttcaacctttacgcggccaccatctgcaatattagcaatggtctcggtgagtgcatccaaataggttgtttctaaattcttttcaattaattgtgttgtttgatcgagttgatcaaacaacgtttctacagcactcttaggcaaaatagccacctctattcattagattcctgttatattctatcggtattctaacggcaaagcaagtaatacaggtgggtatacctagaattataaatcatagtaagcgctttatcaaatagaaaatttatccttgatctgtttcattctgatctggaaactgttttcgataaccattgtttaactcaatgatgattaacttgtgttgctggtcgatacgactcttaccgatgttagtctttataccttgaattgactgagtttgccgcgctttatttgttaatttaagcaagatttgcgtttggtaatagttagtcaaactgacgtaactctgttgttgctgttggtaactgtgggtcacaatcaacaacgcacttgtcaccaagctcaacatcaaaactgcattcaagagcgcgactgcagagcgtttaatctgtatttttcgtgtcatgttgcgcctccaaaaaacattcatgttgataggctgtcccatcgcttaagcgcgcttcgagttctaaaaaaggttcatgatacaccatttttaaccgcgagaccccatcaaacagaggcatataaccattcttcgtactcgaaaccaccagttccttcttagttttcgttaaggtatagcgtcgtttcgaatctttagcgacggttaattgctgttcataattcgcctgttcaattgaaataaattgagcgtcatccagaaaacgatcaagttcaatcatactaatgtgccaattaatattctgacgttccatctgggttaattgcgttgtgtgcgttagtgttttagtggttgccaatattaattgactgctcaatatcagaataacgagagctacaaccatttcaatcagtgtaaatccagagcgtttagtaacaataccattgaagtgcaactcgctcacccgctttatttgtgacataaatggcctgttttttggtgacgacttggtatgtttcccgttgcaactgccattgtgcttgtggcggctgctcatttgccaatcgattggcagccattgccattacagcatattctgtagtagcacaccgccgttgaacttgatgtgctttaaactgccgtagactcattgtcaaggtcaagcctcccatcaggagaagacttaacgccacgatttgttctattaatagaaatgccggtctacttcttaacatgtaacatcccccacatcatctggacccgatattcataacggtgcccatcaattttagaccgacaaatcaatgaccgcggtctagcagctgagtcatgattaaattgaatcctaaaccatgtttctggatcgacgcacatcaatgtttctggaatcgggatatccatactttggtattgtggatccgcacttgtgtaatgcaacgtgtggttggtttgatcccaagataagtgcacattatgcggctcaacagcgacatattcgcgagtcgcatgccaagacgcttcaaattgttcaaaaaataaacgctccgcctgccgtgcacgataatctcgaatatgttgcaacgcaaataaactgactactccaacaatgaacaaaacaagacagctctcgattaaagtgaacgccttattttgtattttgaacaactttattatccttaattgttatgccgcgtttttcagcttgtttaacctgattattggttaaatatttttcacctgatgctaaatcggctagactcgacaccgttttaccgtcatcctcagctaattcaacttgtgtttgaatcgttgccactagagccgtatccgttttttgctcagctgtctctttctgatgcattaaattaggtgcaattaacaagactaacattgctatcacagctagcacaacgaccatttcgatcaatgtaaatgcatttcttttcttcttcatgaaattccctccattgtatgatatagcggtaataaaatactgagataggtacaaataatgatgatcccaattaggataaacaagagcggttgtagccaattcaccttctgtttcaattgccgttgcagttcatcgtatttaatgactgcaagcagatcaacctccttggccatctgttgtaacggacttcccttagcgagcactaattgcagttcaggtggataaaaaacgccatccgctaagttcgctaatagcgtgccccccttttggacagccgtttcaagttgttgcattaattgtacaagccacgatgttttcgccaaacgatgtgtaagctgatgcatttcggccaagtttaagccgttattcaggcaagtcgctaaatcaaataataagcaatactgatagtaagcctgcaacgttttaccgatgaagggccatctaaatgccgccgccaatcgttgtaatagcggtcgccgatgccaacggaataaatacacactaatcagaccaccagccataataacgaatgtccccatcactctaaaaaatagttgtaatggtgatgtcgccgaagttgttgggttaaactgcgcgatttccggaaaaagataaatctgcatcatcccaatcaacgccccgagaaaaaggagtagaaaacagggataggcaattacgccaactaactctctacgccgtttctgttgaattcgctgtaattggccaagatgtaacaaacactcgcctaagtttccctgcaactcagtcaattcaatctgtgcaacaaggtgtgttggaaacgaaaccgccgctaagcttggtgctagtcgttttcctgcttctaacccagtttgcacctgatgcagccactgcttttgtgtcggaaaaacaatcggcatgaactcaagtgcttgttgtaaagaaaaaccattttgcagtaagcgccctaacagcaacataaattcagtattgaattgaacagtggttttagtcttcatgaacagcctcctccaactgttgtgcagttgctaactcatagtgggccgctacattgtggccttcgaccactagtgattgataggcaacacccgctaaacaagcggttaattgtgagtggctaattccaagatctaatagacggtccatcacccccgttgtacttcgcgcgtgaatcgtacttagtaccaagtgaccgctcaacgccgcagaaaccgcgtgttgggccgtctgtaagtcgcgaatctcaccaataattaaggtatcaggccgtaatcgcaaactgattttcaacaatgctgcataggttaaccctgcggcttcattcacctgtaactgtaagaacgctggctgttgaatctctatcggatcttcaatcgcaaccaccatcttatcttgcatgacttgttccgcaagatagtacaaacttgttgtcttccctgaaccagttggaccggcaaatagcaataatcctggttgctgaattaactgcattaaacgacttaaaatctgcgagtcgtcgcaatgataagtctgcccaatgggataaatgaaacgaacaactaaactttcccgattcaaaaaatcccccacggttgccaaccgtaaataaatcaattcgcctgccacctcgatcgctgaacggccggtctgtggacgccgagtttcactgatatccatccccgcttgatacttcatttgattgagccattgattgccttctgacagagtaactttttgtaacggctttagtcctgtcgctaagcgttcaataattgcccaacccgtcgatagtggtcgaaaataaagatcctgcgctttttccgttgcgcacttttgcaaaagggttgttaatacttcggtcatctcgtccctccttcctgactaaccaaagatacgcaaataaccggataattttctgcacaaaaaaagtgcgttgcaattacttgcaacgcacttatcaaacaaattagtcttcttctggtagttcgccagctgtataaacttcttgaacatcatcgttgtcttccaaagcatcaattaaacgttggaattgttctgctttttcaggatcaaccggtgttgtattttgtggaatcattgttaattcagcatttgccaatgtgtatttcttttcaagaatatcacggacatttgctaattccttaggatctgtgtaaatttcaaacacgtcttcttcagtttgtaaatcatccgcgccagcttctagaatgtcttcaaacatttgatcttcatcaacatctaagccttcacgtgcaatcgcaatgtaaccacgacgatcaaacatgtaagcaactgagccagaagcacccattgtcccgccattacgagtaaatgcaacacgaacgtctgaacttgtccggttcttattgtcagttaaagcgtgtactaaaacggcaacaccacctggtgcatagccttcataagtaatttcatcgtagttcgcgccatcgctaccgtcagctttatcaattgcccgtttgatattatctttaggcatgttagctgaacgtgctttatccataattaaacgtaatgcggcgttagaacttgggtcaggaccgccacttctcgcagccatgaaaagctcacgggatagtttttggaaaatcttgccgcgttttgcatcttgtgcgtttttacgaccctgaatattatgccattttgaatgtcctgacatatctaactcctcttttcgattatagaattctggtactaagtcgttttctatgatagcaaattaccatgctaaaagcaatgatagtcgggctatcgtctctttttttgtgtaaaaatccactgtagtgcgcaaacaatcacaatccccgttaatgcgccaacactgtccaacatcacatcttgaaaaagtggcgtccgatcaccagtcaacatttggtgaaattcgtccgtggccgcatacccggttgctgccagccaactaaagataactgctaaaaaaccaccggttacgcgtggccgtagccctaaataactaaaagccgccaataagaaatacgtcccaaaatgggcgccttttcgcacgaaaaactccacaaatttgaaatacccagatgcttttacactctgttcactgcctgcataatggaacgaaaattgacttaaccaagccttaagtggttcattcttgagaaatcgttccaaagtgggcaccgatgtttgttcatgatacgtcattgaagaactgtaaaataagatcgccatcatcaccagtgcagccactaagaaccaatcacttttacgtttaaacattgctgacctccgaaaaactagtatttctctattataccaaagcacacggttgtgacgagcactattattcgttatactactctgaagaaagagggaaattctatgtctgatcaagatcgcttttaccaaccacaaaacgctaaagatgcaatgcgttttgttcaaaaacttttcaatcaatataaccaagcgccactcacagaagaactaattgcctatcatcaaaaattattggcttatctcactaacgatgttacaaccgaagtccaaaaacaagcaaattctgaacaagccgaaaaactgactggaatgattgaagccatgcaagattggttgaagattcgcctcagtggccaaccatatgccgggaaaatgcaacacttcaagttcgttcctgatagccaacaagcccacttcaaaacccgcacgattaaaggtggcaaaaaagcaaataacctcagaacatctgcccgtcactaattcgccttgctattttagctaaaagtgctaaaatatttttgtaagcgtttgggcccgtagctcagttgggagagcgcctgcttcgcatgtaggaggtcgccagttcgaatctggtcgggtccatcaatattaaataaaaccaccctattatttattagggtggttttttcgttcaattatttaattaatcgtatttaaaacgtctgtcagcgcttcacgggttaaaggattaggaaaactgtcctgcttcatttctaataataaccatgtacctaactgtagaaattgttcttcaggcattgcgtattgtaattttaataatcgttgggcggcccctctagtatcgttggcagcaattaaacttgccaattccctttgaaaaggcaattttttagcattttcttgtggaaagacaacctccgactgtgaattaccactttgtttcgataacaaataacccattccttccgcaaaagaatcaacttgtcgcatcaaccagtcttttttattgtccattttcatcccccccaattatgattattttaacaaattattatttgaagaacagtatttaaggtcacgaataattctctaattcgctagcctcaacattattcattttcaaagtgcacaacttaatcgttgccaacttctgcatctagcgctatattattggtaacccattcacaattcgaaggagatttttaatcatgacagataaagtctttacaaaagaaacactcgctcaatataacggtcaagatggtcaacccgcatacgttgccgttgatggcgtcgtttatgacctttccgcaatcgccccttggcaaggcggcaaacattttaaaggtttaacagccggacgtgatttaagcgaatttttcgccaagtcacatcacacaccagccactttaaaacaagccgttcaagtcggcacttaccaagcttaataacaaaaaaatctgccatcaacaaaattgttgatggcagattttttaataattcaatattcctagaaacatcctagctgctgacacgccctagaataatagtgtaattaataaaatcgcgaggactacctgtacggtcactaatccgccggcatatgctaataaacgtttaccttggctgaagagtgcctttaagttcaagcgtaacccaatggctgctaacgccgttgtttcacaccatgtactcaagaaatggcacagtgtaccaaattggcttggaaaaacccgtaagctatttaagacacagaataataggaagccaatcacgtaccatggcactaagctactcttcttcgctaataattgttcgctcagttttgtatcactgactttactttgtttcttttgatgtaagtaaccaaaaccgctgacaacaaaaaccaaacagatgatccgtaaaattttgaataaggtcgctgtgacaaccgttccttggttaatcatcgtcgcactggcaaccacttgaccaactgactgcactgttccaccaattaacacgccacggagttcattattatgtccccacatcaacgttccaataactggcaagagtaacatcaagatggtccccattagatttaccaatgtaatcgcaatgccggtatcttcgttatcggcatcgatgacgggcgcaattgccccaatcgcactcgagccacaaacggcattcccaccggccatcaataaataggtaccttcgctaaattgcaaccggcggccaaaccagatggcaaatccaatcgtacaactcatttgtaacacggtaaacagcacaccatgccagccgatttgttgaatactttggaatgtaattgtcgcacccagtaacatgactgaatattccaataattttttctcggaaaacttagttccggctgctaataccggttgttgcaaccaagtattgccaagtacgatgccgacaaaaagcgcaatcgttgcgccgcctaacattggtaaccataatttagcgatgtaataactggcaatcgcaatcgctaacgataacgcaaagccaggtattttttttgttatattgtccattgctttactccttctcacttgttatcttaaactataccgaaactctttcaattaataaaataaatctttataatagtttttattaagataacgaatagaagtgatgatatgtttaaaattttaacaacttttaaaaccgtttatgaaaccaagaattttacaacggctgcgcaactgctttttctatcgcagccgaccgtttctgtgcaaattaaacaattggaagatgcgctgggggtcacactatttgaacgcaatgggcgccagcagatgacgccgactaagagtgctgatctcttctaccaacaagcacaacaacttcttgatttatgggaccaagatttgcacgcactccatcatcaagatggccagccaaaaacaccgtgccgaattggcgcctcgcacaccactgcaacctacttattgccaaccctgcttaaagcgcatcggccagcccttgaaacactcgccttagatatcagtacactcaactcatcgcagattgttcaagaattgacgcagcacaaactagactttggtttcattgaaaaaccattaaccgaaaaagacttgattcggacgccactacagaccgatcaactggtcctagcaggtcgcccgaatgaaccttggttacttcgtgaacagggttctggcgtctatcactacacgatgaattacgtaaaagaaaataatttaccactcgaaaacgtgatgaccatcaaaagcaatgcgatgattatccaactattaagacagggtatcggccaatcattagtttctagcgcagccttacttgattacccagaaattccctatcgaccattgtcccaacaatatcaacgccaattctaccttgtcgcccggaagaatttaccagcaccaatccaatcatttattgcgttattaatggcgaccccactaccaatcgaataggagtgttattttggaaaactcaccacatatcaaaaaagaattaacgggctacatcatccgtgacgttttcagctcgttaggcttatccatctatattttagcggacacatattttatcgcttacgcagtcggaccaattggcttggccgctttgaatattgatctgcccatttttaacttatttaacggtttaggtctgatgctcgggattgggggcgccacgattttctcaattaacaagagcaagcatcccgaaaagagtcgctcgattttcactcaagttctttcttttgggattttattaggcctcatcatcatggcgctcggcttaatttttattcacccactactccacttactgggtgccaatcatgaaacgctcgccccaagcttgacctatttacgaattattttaattggcagtcccttatttatcatcaataacttagtcttaagtttcgtacgtaacgatagtaatccacatttgacaatgattgcgacactttcacaaagcttattcgtcattatcttcgattacctcttaatgttccccctacacatgggcatgatgggtgctgcgatggccacgatttgttcgccaatcgttagcctactgattttgacacaacaccggcatcacccacaacggttactaactttgcagcacttaaccttacgttttgaaccgacgttcaaagcaattcaactcgggtttccatctttcttaactgaaatgagtactggggtcagcattttcgtctttaacatcgttattctccatctcagtaataactatgccgtcgccgcttacggcattatcgccaacatcttactagttggtctatccctattcaacggtgttgcagtcggggttcagccaatcgttagtcgcgaatttgggaaacatcattgggataatgtcaaaacgagtctcaaaatcggtttgctttccgcactcgggattgcggtaggattatatctcgttttgattggtcttaaattaccgatcatcgaaatttttaaccatgaacacaaccaacaactgattcgctacgcgtctgctggcattcccttgattttcattagttttttcttctcaagcatgaacatcgtcaataacttattcatgaccgccattgcgcaacctcgattgtcatttttcgtggccatcatgcggggctacatcgttttgattgcgagcgtcttggttctttctagcctcttcggattaaccggtgtttgggtgagtgtcccattaacagaaattttaatcttcatcatgggaatgctcatcacgcggaatctcttgaaaacaatcgatcaatagtattaaaaaggtgtgtcacagctcaacttgctgcgacacacctttttttatttaaacatcaattgttgaatcagtgaaatgacggttggattatccggcaattcagtatgggctgcatggtgctggctcaccgaaattgtcatataatcagcaacttgcttttgaaaaatgagccgaccagccgcaacactcgctgctgggacaatcccatcattcttatcgttaattgtgccgccgactgaatagaccactaagtctttggataaatgttgccggcggctctttaaatcagctaacatcggtgtttcctgagtgatgtgctccgacatgccattatatggcgttcccaacgtcagtaatcgcgtaatcttcggtccacttccactacgctcagcataccgcgttaatacaagcccaccgttggaataaccaaccccaccaaaatgcgtaaagtggtattgtttagctaatttacctgctgccaatttaaaccattcggattgtttaaagacgttctcatcaccatctgcattgttttcaaacgcaaccacaatcacggggtgttgtgttttttgatcaaagcgaccactggttttcaagtgaccattttttaataccgttacttttaaaacatggcgtgtggcttgacggttcaatttagcaaaggtgccattaaacccttcaactgttccattactccccggtacgaaaataacgggctggtttgcggtggccgaagttggctgaataatcgatggcaccgttgttggaccagtcgctacatgaccgataaccccaccaatgccgaaacacaagatacaaattagtaaccattgccattttttcatttgtcatcttcctttgaatcaatcaattggtaatcgttctgtaggtagaatcgcttggatatcggctgcaatcggtgctgtaatcgagattgattgttgactgaatggatcttgaaattgcagtcgatacgcgtgcaatgcttgtcgcattatccctaaatcaagcggcccatcatagagctgatcacccaccaatggatagcctaacgcgctgaagtgaacccgaatctgatgcgtccgcccagtatgaatctgaactttaaccgccgtcaactgacccgatgcacccaagtgccaataactcgtccaagctgactgaccatccgccaacaccgcacgccgcggttgatggtcgatttgtccaatcggttcacgaatatcccctgatgctggtaaacccgttcctgaaacaactgctaaatagaatttttgtaattgatgctgttcaatctgcggttgcaatagactttgtgcaatttggtgtttgccgactaaaacaattccacttgtatcaaaatccaagcgcgtaatgatatgcggtactaaatctgttgcaccctgcgcttgccagtaacccttaatgcgattcaacaaagtatccgtttgattagtgggacccggaatcgttgccaagccagctggtttattgaccgccaaccaatactcgttctcataacaaatagtgattggttcgtgactaacagcaactgattcatcggccggttcagctggtaactgcaatgtgaccacatcgccgcattgtacctgatcactaggcgcacttttttgtccgtttactagaatcggttggcctaacgccttaattttggcgtacaatcgttgactgatgccacttgctagcaagaattgtttaacagattgtggttgattgacgtgccatttaatttccattattcatttcccatctttgttctacttactgctattatacgatttatagcttgccaatgccaatcaatggccgaccatattgtttgctaaaagcttcaccaattcgctatgcttaaattagtaagtaaaagtggttgccttttcaggggaacgtgctatactaaagttacttactaataataagtaaaacaattggaggtttcactatgacaaaaaatatcgcagttttaattggtagtttacggaaagattcatttagcaaatcagttgctaaatcattgatgccattattcccatcagattataatctagaaattgttgaaattggtgacttaccattgtacaaccaagattatgatgatttagatcaagtaccagaagcttacacaactttcagaaataaaatgaagacaatggacgccgttttattcgtcacaccagaatacaaccgttcagtaccagccgtattgaaaaatgctttagacgttggttcacgtccttatggtgcaagcatctgggataacaaaccagctgaaatcgtcagcgtttcacctggtgcaatcagtggtttcggtgctaaccaccacttacgtcaatcacttgttttcttgaacatgccaacggttcaacaaccagaagcttatatcggcaatgtcatgaacttattagatgacaatcaagaaatcacaaacccagatacacttggtttcttccaagcaatcgttgatgctttcgatacattaatcaaacgctattaatcgaattacacaaaaaacgccccgactttcgtcgcggcgttttttattttgtattagtttaccaattcgttgcattccagattcgaccatcaagttcaccttggcgttgttcaatccgtaatgctagttcatcactcgtttgttgaagcgccgtataaaaagcttgctcttcatacgttgtggcttgttctttttgtagttgaatttgttctgttaaccaatccattagccttccccctcttcttcgcgaatcagttggacttgccaattcaaatcggttaattccgatcgtttgtcggcgaattgttcgcttaaaagcattaaacgttgttgcgcttcaggcgatgtggcttcagcagcctttttagtcagcatcgcttcaaaccacgctaattgctgatcaaaattgaactcggattgcgtcaaataccgttgataatcgatgaccaagcattgtttatcagtttcttgccaataacccaattgatgaatcgcaagtggtggtaaataggtcatccctagcttacgagccaccaattcatatgggcgcaaaatttcagacagcgttgcttgttcactgccgccagcttgaaaatgtttagccgccgtaccagttgaaacgacaacccctagtgttttcccggctaatggttggcggccattaaaggcaaattgccccgttaaaacggtgtccaaccacatttttaagctcgctggagcagcataccaatagagcggaaattgaaaaataatccgctcatggttgcgtaataatgcttgttcagcagccacatctaacgtctcaagcgcatctaagtggtgccaagtgatggcttccagtggtgctgcactcgcttttaaaaagttttggaccatcgacgtctcaatctcgggatggctgataatcaccaatgttttcatactctaccaactttctatttctaaagtttaattgtacaaaaacatggcgtaaattgcgactaatagagttccaaatattgttcgcgttcccattcggaaacttgttgacgataagctgcccattccaatgatttagaatccatgaagctctggtagagataaggccccattgaatctttgataatctcatccttggctagttccttcaatgcattgtgcaatgtggatggtaggtcagtgatgtgattttccttccgttctgtttcgtccatgctatagatgttgcgatccacaccagcatcaggcaagagcccttgatctaagccagataaaccggctgccaaaatcgacccgattgctaaataaggattggcacttggatcaacactccgtagttcgagacgcgttgataacccgcgtgattgtgggacccgaatcaatggtgaccggttatgaccagaccatgcaacataaaccggtgcctcaaaaccagggactaatcgtttgtaagagttaactgttgggttgttgattgccgtgatggcgcgtgcgtgttgcaataagccagctaagaaatgataagccgtttttgaaagttgttctgtacctttttcatcgtagaaggcattcgtaccatcttgattaaagagtgacatattaatgtgcatcccagagccgttgacaccgtgtaatggttttggcatgaaggttgcatgtaatccatgtttccgagcgattgttttaacgactaatttaaaggtttggatgttatccgctgcatcgactgcatcagcgtatttaaaatcgatttcgtgttgtccgggtgcgacttcgtgatgactggcttcaacttcaaagcccatcttttcaagttccaaaacaatatcacgccgacagttttcgcctaaatcaacgggggcaaaatcaaagtagccgccttggtcgttgagtttcaacgttggtttgccgtattcatctaatttaaagaggaaaaattctggttccggtccaatgttaaagtctttgaaccctttatcttgcatttcgcgcactaatttcttcaaattattccgtggatcgcctaagaatggttctccatctgcggtatagacagaacagattaaccgcgcgacttttccatgttccgcttcccatgggaaaatgagccatgtacttaaatcaggccgcaaatacatatcactttcttcaatccggacaaaaccgtcgattgaagaaccgtcaaacatcattttgttacttaaaactttatctaattgactaattggtacttccacattcttgataatcccgttgatatccgtaaacattaaacgtaagaacttaacgttttcttgatccactaattgcttgattgcttctgctgtcaatactttacgtgccattaatccgtcgccccttaatataatttagatgattgtgaaatggttgactgttgtccaactaagccgccgaccgataataattcgttggccaataaccgccgcgctttttcgtctgataattgtttatcacgctgccgatccgccttcttctgataaatctggcgaatctgtgccatcgtggtgccttcagctaggtaatccttgatttccaacaaacgatcaacatcgttcaacgaaaacaaccgttgatggcccgttgtccgttcaggaaaaacaagcgcctgtgcttcataataacgaatttgacgcgcagtttgtcccgtcaatttcattaccgtaccaattggtaaaactgctaagttgcgccttaagtgtttttcagccatccatttcacctcacttgcgttttatcttaccagtcgcctttcaaacggtcaacatttgatgtcagattttctaacatcagccaacaaaaaaaggtaaaccaatttggtttaccttttaggcattagtcttcatcgatgatttgaatcaaaccacctgcaagcataaacaaatgcgttaccaccggtccaacaaatttaaactggcgcttctttaactctttcgcaagttgcgtactgatcggcgctgatttatcggacacgccagccatttgtgaatcaagcaattgcggctgaccatcaacaaacgcccacaaatacgctgaaaaactgccatattcagtttggatggcttgaattgcccgcgcattttgaatcgttgcccgaatcttacgcgtattacgaatcatatctggttctttttgcaggcgttcaacatccatttcatcaaattgtgcgacttgatcaatcaccatccccaccatttgttgtcgcagaactggtattttacttgcagctactttccagctcaaccccacttggaagaccccaactgttaagagttcaaaccaaatacgatcatcgtgcgttggcgtgccaaaataattgtgataagcctgaaccccatctgtcgccgtttcaaagttgttttttgctgtttcatctaccatcgataaaccgcctgtcctgcgctttctgctggaaccccaactttttccgctaattcgctgtaatgtacctctaaataattaaagcagtcagttgtgtcatgcgtcataaaataaggcagcaaagccatctgatcatcaaattgaacgtgttcctgttgtgcataagctttcagaacttttgccaactgaagaaaatcctggttggtaatatagtatggtgctacggattgctttgtatcaaccgtcacgatggcccgataagcgtgcccgataccttgtaacccgccaatggttgatggtccagcagtctgcatgaccgcataatgaattgttcgaatttccgttgtcgcaagttgcttaacaacttttgcgggcatgacttttaaaacatctgtctgctttaaaaaaatttggcgcggttctaatacaattaaataaggactccgtgcttgccgccaattcgctggcattgtttggccatcactagtaacagttacatccgtcaaagtgacactgaactgttgtgctaaatccacatagtgttgttcgggttgttgcataatccgtcctaaatcggacagcggttttgtattttcgctttctgccaaatgccaatgttgccgcaaccgcccaaagaatgaattcggtttagtgaccgtttcaaccccgagcaaagtattcaaacttacattatacaatttggcaagaacaaccaatgtattcaagtctggtgcacttttatccgtctcccatttagaaatgacttgtcgtgacacattaatctgctctgcgagtgtctgttgagagtagcccgcatccaaacgaaattgttttaattgttgaccaattaacatctaaccacctccaagacttaccgtagcgagaatgacacatttatactagcaacaatccaaagcatctcttaaaaccgaccgctacgattcgttgcacccttatcataccatgcttaacgcacaaaaaaagcggtcaatcaaacgcgaatttgattgaccgcttggcatttatttttcaaagaaggttgtttggactgcccgactaatcgcgagtttaacgtgcgcgtaagttaacccaccttgtaagtaaagtgtatatggggcgcgcaatgggccgtctgctgaaaattcgatgctggcaccttggataaaggtcccggcagccattacgatttgatcttcgtaaccggcaaaatcacttggaatgggggtcacaaatgaatcgattggtgattgcgcttgaacacaaccagcgaacttaaccatatcatccggattaccgaagttcaccgtttgaatcaagtctgttctaggggcatcccatttaggtgagacactcaagcccatttgttccaaaagcgctgcttcaaaaacagcccctttaatcgcattaccagtcacacttggtgctaagaagaaaccttcaaacatcaattgcagattgccttgtgtggcgccttcactggcaccaacacctggcacagtcaggcgataaccaatcatttcgattaatttttcagtcccgacgatgtaaccacccgtttgcgcaatcccaccaccagcatttttgattaaagaaccggccattacgtcggccccgaattctgttggttccgttgtttcagagaattcaccgtaagcattatcgacaaagacaatcaattcagggttaatgtttttgacaaaggcaatcatttccttgattttatcaaccgtgaaactatcgcgatcagcatagccacgtgaacgttggatagcgaccacttttgtcttagctgtaattttggtccgggccgtttcaaaatccacggcaccatcagctaataatggcacaaaatcgaatccaatttggaattcttttagtgaaccaatcccgttaccggccatcccgatgacttcttgcaacgtatcatatggttcgcccgtaagatataaaagatcatcgccaggccgcaacatccccaataaggccgttccaatcgcgtgtgtgccggaaaccaattgcggccgcacaagcgcatcttcagttttgaaaacgtgactatagacggcctctaacttatcgcgtccttgatcatcgttgccgtaaccggttgtcccgtttaaatgcgattcagaaatattttctgcttgaaacgcttcgagcacctttgcttgattattgatgatttgttcatccagtgcttgtaaacgcggtgcgatttgcgtatcaactgctgcgattttagcttgtaattctggtgctaagtttgcttgccaatccattttttaaccactccatttctattattgctgtaaccattgttgtaaatcggtttgaatccgagccaaatcggcttcaggttgttcaaccagattataccaattgaccggaatctggtttctaaaccacgttagttgtcgttttgcgtagtgccgtgaattttgttttacttgagcaattgccacgtctaatgaacagtcactatcaaagtatgggaagaactctttatacccaatcccccgcacggcttgcggactcgtttcacgatgtgcataagccaaccgcgcttcttctaaaagtccagcatcgatcatttgatccacccgctggttgattcgctcgtataataatgcacggtcacaattcaatccaataataaacgtatcataacgtaattcttttggcttttgttgtgaaaacaaagttcccgttgtttcataaacctctaatgcgcgaaccacacgccgtggattcgcactcggaattttagcggctgcttgcggatcaatttgattaagcatctgccacaaagcttcttcagaatgctgatccaaaaaagtttgccatttttgacgaatcgtaaaattctgttccgcatcttgcgcactacccagggtcatatcgtacagtaacgcctgcaaataaagtcccgttccaccaacaaccaagggcatgtgttgccggccgacgatttcagtgacgagttgttgtccttgctgttgaaagtcaaaggcagtgaagcgttgatcgatatccgccacatcaattaagtggtgcggcgcaagcgcctgctcttttggtgtgactttggccgtaccgatatctaactggcgataaacctgcatcgcatccccggaaataatctcaccttgcaactgttgtgcgagttgtagacttaacgctgttttaccaacgcctgtcggaccaacaatgacgattagcttttctttttccatattttcaccacattaattaacgtattttactagctattcgcgcttaaatacgcgataataaagttgtacttgaatgaattgagacttgaggaggctttacctatgaaacataaatttctaaaaggtttcgtaatcggaaccgtttcaacagtcggcgcgattgccggttcactcttggcatttaagaagaccgtcgttgatccaatcgaagaaaaagaaaatcaaattgaagaaagtcgtcgacgtgctaaccgtaagagccattcagctcaccaaggctaagcgctttgaaaagactgcgtccgttgcctgattggcgacggactttttttgtggaaacgtgctttttaaagctgactcttgggattagcttcgtattgcaaacgaccaactttgtcggtcattaacaacactatgctaatgctcagagtcaaaccgctttaaacgcactctgttttgaaacgtgcgccgccagatatactctttcggttagttacataccgtaaacgatcggctctgccgctcatttacggtatgccactaatcctcagagtatgaccatctgcctgcgcactctataaaaagcccaacagttgactagtttttttcgctagtaactcttgggcttttttggtttaatttaatttctttttacgctttgttttgccggtccaaccagcataaccctttttcaaccatttaatgtcggtgaaaccagcttttcttaacttcagtgctgctcggatactgagcgtaatgcctgcatcatataagtagactggtaagtccatccgtagttcacccatattttgtttcaacattggataaggtaagttgcgggcgcctaaaatgtggcctgcatcaaaatcttttttatcccgtaagtcgacaatttgggccttgcgcattgtttcttcaaacgccgcttccgttaattcgccgcctaagcgtttgcgttgaatttgataatatgcccaatcgcccaagaaccaaagtaaaatggcgatcagaataatattaattactacccatacattaattgtccctaatacaagcatcgataagactcccttataacaaattattgttgatcaaattgaagtgcaagtgaagcagccccgataacaccggctacgtttcctaagtttgctaaacgaatcttagtcgtatttttaacatttgggaatgtaaattcttcaaagtaagcttcaacttgtttacgtaaaaattccccagcagctgaaacaccaccaccgataacgatgtaagcgggattcaacatgttcccaacgttagctaatgctaaaccaaggtagtaagaaacacgatcaacaaccttaacagccaatgcatctgattctttagccatgtcaaaaactaatttagagctgatttcttcaccatcatccaacattgtctttaattttgaattaccagcgtattcttcagccatgtcacgtgcaacgcgcacaacaccggttgctgaagcataagtttctaaacaaccttgtttgccacacgtacattcataaccatgtggttcaactgttacgtggcctaattcacctgcagaaccagcaacaccgtgtaataaatggccatcagcaacgatcccgccgccaactccagtgccaagtgtgacaaaagcaacatcgggttggttttcaccagcacccttccaacgttcacctaaagcagcaacgttggcatcattatcaattgcaagcttcatgtgtgtgccagcttcgatatcgcgacgtaagtattgggttgtcttccagtttaagttgtaagcaccaataacggtcccttctttactgttaacactaccaggtgtgcccataccaatcccgatgaaatcagcaggtgtcatgttatataaatctaaatgatgattaatcgattcaatgatatccggtgtaatgtggctaccttcatctaaaatatccgtatcgatactccagcgttgttggatttcgccatccattgtcataattgcaaatttagcagttgtcccgcctaaatcaacgccgattaacttcttgtctgtcatttaaacttctcctccaataaattgtgattaaacgcttcatttttctccaaccgatgttcacgcactaaaaccatcttagcatcacgatacactttgccatcgattaaccccgcatcataaacgtgccgtaattcgatactggtgagctcgatatcccaaagtcgtttaccaagatggacgtaaacgccaaattgttttaaaagttgttgtacatcatatagagttctcatcaacttcacctttaacattatacataaattgattaatgattcatacccagaaaaccaaataaaatcatcgttgcaacataaattaacccactcaccacacggttcagcgggtcaatcttacccactttaggtgcacccagcgccatactacttaaaaagccgccaagtaccccacctaccattgcgtacaatgcattgtgatcgacaataaattgtaatccgattgttaaaaataaaaacagccaatactggcgtgccacttgtcctagcacggattcttctttaaaggcatcacctaacatcaagaagccaccgaatagccctaagatagctgttccagcagtcacggttggtgtatcgagaccaaaaaaagcgcccgttgtaaacaaactcgccaaactgctcagtatatagatagctaataggcgccagtgtcctaataatcgttcaagttgtccaccaacaaaaaacaaaataaccaaatctacgaagagattcataaaccggccatgattgacagatgccatcataaacccaataatccggccattcattagcatgttaaccgatgtaaagccgttcaaccatacaaccggattcaaaaacatcattgcaaacatcaaaatcgttagtaacatcaaggcatacaccacaatcggtgcgtcttgccaacgttctttaaaattagtcatcttttctcctttagacctgaagaacctgatcgagttggatatcgaattcatcaatggcccaatcagcacttcgttgttgtggtttaagcgctagtgcaacagttggcattggatatttggcaagataacgatcataataaccgccaccaaaaccaacccgccaaccttctggactaaatgctagtcccggcacaatcattaaatcagggattaacacctggctaccagctgtaaccactggttctaaagcaccataggaactcgttgttaattcagtggttgccgttaacgggtaaaaagccatttgtcgctctggcaatgtcttgggcactacaacttctttaccggccaaacgaatggcatcaattaccggctgggtcgccatttcaattggctgactcaacgtgacaccgatgattattgccttttgaaacacctcggttgtcattaacaattccaaaagttgtgcttcttgggcatgtttaagcgcaggcgtctgcgcaagcgtttgtaatgccgcaatttgttgttgccgaatttgctttttagtccgcattcaaaagcctccttaataaaaaaaagcccgagcgcgaagcgccccgacttttgatgtgcgtcactattatttagtttcgcggtgtaaagttactttgcgttcgcgtgggcaatatttctttaattccaagcgatctggattgttacgtttatttttgtttgataagtaactacgttcgtgacattctgtacattccattgtaatgtgaacacgcattgatatagcctccaagctgtaagtaaatttctaaaaaactgtttaattcttagactcttagtatcataccattttttatggtatctgaaaaggttattttggaatatttcattcagtaatgttatttaatttatagaaactcgtaatcatttcacgggctagtaacgtattgtagtgccctttatcagagtttaagttcgggaacacaatggcgattgccacttgcggattatcgtatggagcaaagccaaccaaactagaagtaacggtttcgacttgcttacttgtcgaatcgtttggatcttcacgggcaaatgattgtgccgtcccggttttagcgccaagcgttggtttaatatctttcaaggtgtgtgctgtcccccaagcgttggtcccattgacaacgttgtacatcccttttttaacgacattaaagtaactttcgggcgcatcaactgtgctaagcactgtcggcgtggtcttggtaccaacttggccagctgacccatcgttaccagtttgttgaatcgaatccacaaggtatggtttcattcgttgaccaccgtttgcgatggttgaaatgtattgtgccaattgaattaaggtgtaggcatcgtagttaccataagataaatcaagtaatgaaccattggctggctcgccatattcattgacggttggcccttcgatcccggtggcttcacctggcaaatcaatcccagtcttttgtcctaagccaaattgactgaagtagccacgcatcttcgtaaagatatctgaatccatcgttaacgaagaattgggtacatatttggcatgcccttctaacatcgctaattgcatcatgtaaatattagaagaaacttccaacgctgattcagcgttcaatgatccaaacgtcccaactgggtaaacagatttcttaaccggcgttcctcttaaatagattggtgtatccggtaaggtattattggttggcgtaatcacaccatccattaagccccccataacggtcgcccctttaatagcagaccccatgacgaaggtgtgattaatcaccccgagcgcatcatcggcaatttcacctgacttacgatcgttggattcgccagccattgctaaaatagcacctgttttcggattcatcgccacggcataggcaccatcagaatactgagtggctcccgctgcttttgcctgatcatagactttcttcaaagccgcttccacttgcgtttgataagcttggtcaattgttaaatttaaattactccctttttgccctttaaataagacattacttgagagaatctgattattcgcaccaacttcaacttgtgattgcgacttagaaccatgcaagacactttcgtattgcttttctaaataactggtcccaacgcgatcattacgcgaatagccctgtgctagcaaggagttgacgccatcttctggtaacccttgctcttcagttgaaacatgcccaataatactgcgcattgaatcgccattaggataagcccgttcccaatcggtgctgacattaatccctggcaaactcgttagatgttcactgatttcagcaatttccttatcagtcacatccgtatttttaatataaactgtcgataattgataagccccactcataattttgaaaatcgcagcggcttgtttttgttgctcgtttaaccctttaaacgactttttaaccaattcgattgttgattgataaaccttcttttctggcaactcagaaccatcactggcaaccttcgcagatttaggcagttttgcgttccattttttaagattcttggggttactgaggtagtagtcaatctgatcacgttcagttaacttatccgtcgggaccgttaaatattgggttaacttattggcctctgcatacattttgtctgccaagacattcatattcttcgtataagtaatcgccggtttagcagtattcccaactaagacacggccctttgaatccagaatcatccctcgaggcacgttacctgtaacgattttcttatcagtactgttgaccatcgcttgaaaattagcgccctccatcacttgcaggcgtcccaattgcataatcaacgcggcaaataacgcgaagacaacgaataataggaaatttaagcggaatggaatcagtgatttttcacgattttgtttgttttttctcttaatgattttcacagacggtcagatactccttatttagcgccgctctagtaaaagatggcgccgctctatgcttcaaaaagtcgccaagcgaccttttgagcgattttgtgctgtattgtttaagtttagcaaaattatcttaaacaagctatgccaaatctctaaattcaaacgagattatggtatgcttaagcatagtcattaactggttatattttacagcttttctcagttaaaaacggactagcaacctaatttttagatttttttattaattggaggattaccgtgagtcgattttacgcttttgcacgtcgtcattatacattaggccttagtttcttactaccatttggcattttatttatctacggactacttcgacaagtgttcccttttggagggcaaacaatcctgactgttgatctaggccaacaatacatcgatttttacgcttttttcagaagtacgctattgcaccatcccgaaacttttttttattcctttgctaagggcttagggggcgacatgcttggggtctgggcttactatttgatgagtccattcaatctaatcgtcctattgacaccaggaacttggttgagttttggtgtttggctgcttgtccttttcaaaacaggcgccagtggtcttagctttgcgtactacttaaaatctaacaaactactccatagctggtggttaccgacacttagtgttgtctacgccttatccgggtttgcaattgccaaccagtttaacgttatgtggttggatgcactcgtctggcttccactagttgtcttaggcatcgaccggctctttacaggccgtcacttttggctttatccattgagtcttgccgcactcttaatgagtaactattatatgggctatatggtttgcctgtttgtcattgcttattttgcgtgggcttgtgctcattattggcaaacttggcgccatctatggcaacgcgctgcccgcttcatcagtggctcactcttggccggtttactctcagcctggctcctattgccaacttttttccaattgacgcagagcaaagggcagtacaccattcaaaagattcattggaagttcgaatataatccgcttaagatgctttctaaacttgtgattggcaattttaacttcgaccaaatgccaaaaggcgaaccgaatatattcgtcggcagtctcgtattgatttgtgccatcttgtattttggaacacgcaagattgcctggcaagaacggttagttgccttattagtcaccattttcttaggtgtttcaatgtgttatgaaccccttgatttattatggcacggcatgcaatttccggtttggtatccttaccgcttttcatatgtggttagcttttggctaatcgtgctcgcggttcaacggctccaccagcaccttcgatttagttggtatcaactcttgttgccgtttttaatgttgatggcggcttttggttatactgccaaacatctcaagagcttcaccgcgctaagtcctaatcagattaacttaagcatcgctttcttactgatgacatgcttgcttttactcctgaaaaagccgctcaagcgctattatcctttgctcttagttctatgcgtcggtggtgagatggtcaccaacgcgacaatgagtcttaatcaaattagctatgtctcacaaaaagattacgcagattatacagctcatttacaatcagccattagcgcaattccaaataaaaccgcgtttcaacgaattggcaaaacctttatgcggacaaaaaatgacccgatgcaagctgattatttcggcggatctcattttaattcgatgctcgaactgagctatccgaaattcatgggcagcattggcgaaccagctggcgatggcgccgttgccgatactaatcagaccctgttcaccgatgcgttattaggttatcgctactaccttaacaatactagtgggcaagcaacaattccactcagtacgaataagccggacttagcacgttataacttactcaaaaaaaaagatcaaattgcaatttatcaaaaccccaacgcacttgatttaggctttgcggcctctgaaaaagtgcttaaacatcatgtggttgccaattatcccatccttgaacagaaccagattgcggcagacttagtcaattcagcgacagaacagccactcttcacacttcaatttttcaatactgtcacttacaagaatgctaaacaaaaaccaaaactcaacgaaactttcctccgggttgatccgaagaatccagctcacgtcatctataccttcacacccacaacgagtgacccctattacctcacattaggctcaaacctcgaaaaaaatgcggttcaggtctcattaaacggtcacacgctacaacaatacgatactttccgcgatactgtcgtcttaaacctgacaagtaacgcaatcggccaacaacaaaccgttgaccttagcttctctaaaaaggaaatttggctccaaaatattaatttatatagtttgaattatcaagcattgacgcacctaacgcagcaacttcgtgcacatgcattgaaactgaatactttctcaaacacaaccatcaaaggaacgatcaccattcctcaacaaaaccaagtcctcatgacaaccgtcccctatgctgctggttggcatgcaacggttgacggccatccggttaaaatcaaacgcggcttgaagaacttcatcgccatcccgctgaaaaaaggtcaccataccgttacccttaaatactggccaccttatttctattggggtttgacgatttcactaatcagcgccggctttgcaattggtggttattgcagctacaaatactaccgccgccgccacttattctaaccatcaaaaaaagccccacgcactcaatttaaaatgagtgcgtggggcttttttgaatctattcagtatccgttcgtgctaaaatcagtgcattttcggaatagttaatgtttttgcgtaattcatctgcaagttgccatgaaattttatgttgttccaataactcttgaatcgccactcgttcactcgtgagcgctttgattcttaatttttgtaattgacgttcatagatagcggtcttactccgccccccatttttcatgttttcaatctgattccgataccgcacaataatttgataaataacctgacgattataatgacgttggcgattttcaggctgttttaggaaatacgacaattgtttaattcccgccttagccatttcacgttcagtcaattgccactcggtttcacttggtgatttgatatgccgcggccagagatgcgtcaaaaagcgtttgctgattgaccaagcacgatagacttgtagttgcacatgatgccaattaaaactcgtcccaataaccgataacattacttgtttttgccgtaacttacgtttaccatgccgatagcttttagcactaatggccttttcagcccataacaactctaacttctgacgttctccgtcaaatgccacttgtcgcaaaatcaactcttcagcaattaacggtggtagttcgtcacttgtgcttgcttcgctttgttgactctccaaccggcggatcatcaactgatactctgccaataaatctaaagcagcccggttattatcaatatgccgttgggattcgaccatgctcgctgctactttgtacatgtaaatcttagcgtttgtttcatccaataaatcagcagctgcttcatcttctgcggctgcttcggcttcaagatctcgttgcatccctcgcatctcgattggtgctttgacttttgtcagcttaggaattaagacaacggccatcaccagactgacaataatcacgccggccgcaataaagagcattaagccgcgttgaggaaacggtgaaccatccgctaaaacagttggcaccgataataccccggccatcgtaatcgctccacgaaccccagaaagtccagagagcaccgcaattttaatgttttcgcggaatgttttgggattcgtctggttggtgtagagcaagtaagctagtgtccagagtccccgcacaatcaccagaatcaaccaaaccgctaagacgaggagaatttcttcactcgtattaatcagcggattatgcacggtattatgcatagcgacaggtaattcaatccctaaaattaaaaagacaatcccgtttaataagtaaacactgattgaccaagtttgttcggtcactaacttcaactccggtaaaaaatcgaggaagatattccgtgatgaatgactgatgatcccagctaccaccaccgcaatcacaccggatgcgtggaatagatcttcaacaattagatagatgataaacggtgtcaccaactgtaaaatcgtatggaacatcacatcttcaaagccttgttgtagcataaataggcgaataaaatgaatgattaacatgataatcatccccgctagtgcgccaacaatactaatatacagaaaatcgcccgcggcttgttgccatgagaaatagccggtaacagcggcagcaatcccatatttaaagctaatcaagccactggcatcgttaattaaactttcaccactcactaagtgcaaaacccggggcggtaaatcggcctgttctgaaatcgattgtaccgccaccggatccgttggcgacaagattgccgctaacgcaaaacttgcagccagcggtaacgccgggactaaccaatgaatggccaagccgccaattaacgtcgttgcaaagacgaggaaaatcgcattcccaataattggtccgcgcaacgcccatagttccttcttaggaaaacgacggccatcgttaaacaataatggtgcaacaaacaccaacatgaaccaatctgtttttagtggaatcttgacggcaaagactaacgccaccattaatcccaacccgatctcaattaaactaaccggtaaatttggcaaataatgcccgatgatattggcaataatcaccaacgtaattaacaaaataacagcttcaataattgccatcccaacaccctttctttttaaaacgctcatcctgataaaaaagccctgataaaatcatcttttaccatagcttttcatcattgatttaaccttgcttatgttgcccaataatccggacttctggttctaagcgcacattaaacttcgcccagatcgttttttgaatgtattcgatcaacgtcaaataatccgttgccgttgcgtgatcaatattcacgatgaacccggcatgttttttagaaacttgtgcgcccccaatttgatgcccttgcaagcccgctttttgaatcaacggtccgacaaaatgaccgactggtcgtttaaagacactcccacatgagggatattctagcggctgtttggcagcccgcaaagtgttgacctcatccatccgggcgcgaattgttggtgccgcacccgttgccatttcaaaataggcaaccaacacaatactgccgttatcttgaattaaactatgccggtaactgaagtctaagtcagcggccgttaacgtctgtacttgattatcgcgcattaaaacatcaacgcgggtcagtacatcactaatttcgccaccatatgcgccggcgttcataaagaccgcaccgccaacactaccaggaatgccggcagcaaattctaagccggtcaaactaccgctataagctgcttcagaggtttgaataatccctgctccagcttgcgcggtcaccaagttaccttcaactttaatctgattcatcgccgttaagatgatgactaagcctttaatgccaccgtcacgaacaattagattactagcattaccgataattgtgatgggtaatgtcagttcattggcactggccactaattgccgcacttctgcaacagatttggggagtgcgagtaaatctgccggtccacctgttttggtaaaggtgtataagctcaatggttctgcttgatgaatctcgattgcttggtttgcttgtaaaaatacttcaacttgacttgtcacaattgtcgttcccctcaaaaaataatctactcctagtttaacaaagacggcttgaattgaacagccaacactttttttgcgtattattgactagaccgttaaaatggagtttagaaatgagggatcgacaatgaaatttatttcttggaacgttaatggcttacgcgccgttttaaaaaaaaactttatgaccacttttaatcaactagatgccgattttttctgtctacaagaaactaagatgcaagccggccaagttgaattagatttaccaggttatcatcaatactttaattacgctgaaaaaaaaggctattccggtactgccatcttcactaagcataaaccgctcactgcaacttatggtatcggccaacctgaacacgatcaagaaggacgcgtgattacacttgaataccctactttttatttaatcacttgctacacacccaattcacaggataagttgaaacgattagactatcgcatgcgttgggagaatgcctttcaaacttatatcgctgatttatcgactcaaaaacccgtcattttctgcggtgatttaaacgttgcccatgaaccaattgatctgaaaaatgataagaccaatcatcataacgccggcttttcagatgaagaacgagggcaaatgacaaccctcttaaatcgcggcttcaccgataccttccgttatttctatcctgatcaacccgatatttattcttggtggagttatcgattccacgcccgcgacaataatgccggctggcgcattgattatttcattacttccaatgatctccaacctaaattagtcgatgccaagattcacacggaaatttttggttccgaccactgccccgtcgaacttgacacgcaagatttattcgcttaaaataagcaaactttataaaaagcgaggttcaaaataatgaattttgtcgcaatggattttgaaaccgccaacggtcaacagcatagtgcttgctcacttgcccttgttgttgtgcgcaacgatcaaatcgttgatagtttttatacgttaattaaacctgaaacttattttagcagtcgcaatacgcaaattcatggcattcatgaagccgatgtggctcaagcgcccaagttcaatcaagtctggccgcacatcgcaccatttttcacgccaaacaagttagtggtcgcccacaacgcgaattttgatattggtgtgttgaaaagtacactccaacactacgacattccagaaccccattatttagcgttggatactctcaagacgagtcggcggttgtatccacaatttgagaatcataagttaaacaccttgtgtgataacctagcgattccacttgacaatcaccacaatgcactggctgatagtatcgcttgtgccaagattctgattaaagaagccaacgattttggcgttgaaccgctaaaagcggccaccaaattaatcggctaacaaaaaaagagcggttaacttgtctatgcagacaggctaaccgctcttttagcgaatggtggattaaagctaaattgtcattagggcttcgacaagattaacaacttcatcataatcattaatttgttttgactaatgtacgagctttgtttccgctgttaattataccacaattcggttcatcgtgttaacttattttgacttagattgaccaaaactcaagataaagaccgtactgatcacgagaatcccacccacgacttcccaggtgttgaaactcgttttcaagaataaaacagtaccgatagtcgcagctaatggttcaaaggtattcaataaaccagccgttgtcggtgtgatataccgtaaactccccaagaaacaaagattggcgagcgcggtcccaaacaaagcaatgaataagacactactgattgttgccacattcaacggtggaacaccgacccaaaatggatgaacaaatgtgaagaccaccccaccgattaacatcgcccagcccacaatcactaatgttggatatttttggaataacttaaccggaattaatgtgtttaaagcgccggaaaagccaaggcataaactaagtccgaatgccgcgtgtgaaatcgccaaatgcgtcagttgtccttttgtcactaacaaccacgtccccaacaatgcgacagtcactgcaattagttcaacgcggctaggtgctctacgataaatcaccaagctaattaagatgatcatgatggtgcctagctgttgtaaaatcgtagtcgttggtgcattgctggcttgaatcgttagaaaataaaaatactgaacggccgataaccctaatactgcaaataataacatccgcgtaaagtcccgcggttgccgccacactgtaaaaacatcgttcggttgtttaatgagcgcataacctaatagaaataggcctgaaagccccatcttaacccccattagccattctggcttaattgccgtgtcagtgaatagccactgtgatactggcccttgaatcccccaaaatattgatcctaatacggctaagtaaattccgcgtcctcgttgttgttgcatcttaaatctcctcatccatattcattaattggcacatttgcacaaccggaatatagcccgtttctggcgcataaaatccggctgctaattgtgcttcggtcacaaaaccaaaccgtttgtaaagtgcaattgcacggtgattacgggcttgtactgttaactcaagccgtcgcggatttcctatttctcgaaccgacgctaaaaggtgcgccatcaaatcagagccaattccgcgatgccacttcgcttttaaaacagcgatactaacttcactgatatgtgttagcccctgttctgtcggactattcacacgaattgccccgacaatttgctgttgatcaaaagcaagcaataatacatcttgttgcgattcaagaatacttgctatcaaaaattcagtaaataatggtgttaaagtggctaactccgctggtaacgcaacatacggtgtttctttagcgaccgcctttagaaagcataaataagcccgcgcatctgctgcttgcgcgggccgaatgtcaattacactagtctgcaaaactagtacgcaccaatgcttcgtagtgagcgccgtgcggatcaagtactaacgtccgaacttgatcatcgctaacatccttattaaaatgaatcgtcaaataatcgctcggtagttcttcagcaataaattgactccattcaaccaccgaaaccccgtccccatcgaaatactcttctaagcctaaatcactggcgcccgtttcttccaatcgatacacatccatatgatagagtggtaaccgaccgtcttgatactcacgaattaacgtaaatgtcggactcttaatatagcggtcaattcccagaccagctgccaagcctttcgtaaacgttgttttaccagcgcctaaatcaccatccaacaacaagacatcaccggcttggacttgttggcccaactgtttggcaatcgcaattgtttgttctggatcagttgttttaaattctaacatgttctgcctcattctaattgttatctgtgtgtcattataccgaaaaaagccctgttcgcaaagtcaaagacgccagcacaatttttctgtgctggcgtctttgttgtcggtcaattagttttgtaatgcttgagcagccgtaatgatggctaacttgtaaacatcttcttcgttgctcccacgtgataaatcagaaatgggttgattcaaaccttgtaaaattggtccgatggcttcgaaattcccaaaacgttgggcaatcttgtagccaatgttccctgattgtaattctgggaaaacaaacacagtggcttgacccgccacttttgaatctggtgctttttggttcgcaacaactggtacgtatgcggcatcaaattgtaggtcaccatcaatgtctaattctggcgcaatttcatgtgcaatccgtgctgcttcttgaaccttcgtgacttcgtctgctttcgcagaccccatcgttgaaaagctcaacagcgcaactttcggatcgatatcgaacaactcagccgtctttgcagattccacagcaatttcagccaattcttgcgcattcgggttaatattgatggcgcaatctgagaataagtaacgttcgttatcgcgaccgcgttgcataatgaaggccccgcttgtgcgttggacacctggttttgttttaataatttgtaatgctggtcgaacagtatcgcctgttgaatgcacggcacctgaaaccatcccgtcggctaagtttaaataaaccagcatggtgccaaaataattaggatcttgtaaaattgtttgtgcttgttcaggggttgccttgcccttgcggcgttcgacaaaagcggcaaccattttttcaaagtcagctgttggatattcttgtggatcaataatcgttatcccgtccaagttaaatcctttagcagcagcgatttgttgaatatcattcgttgccccaattaaaatgggtttcaaaatccgatcagcattcaaccgtgctgctgcaccaataattcttggttctgttccttccggaaaaacaattttaaattgccgattggtaatctttgcttttaagctttcaaataaatccacaattgcaacctccagtaagcattttattattgctaatgtaatcatacaacgtttctaataccgcgacaagtcaacaatggtaacgcttcattattctaccgtgactgtttgtggtaattgccaattaattggcgccatgccccattgctcaagggcagtattcgtctgtgagaaaggtttagagccaaagaaaccatgataggctgacaagggactgggatgtactgcagtaatgaccgcattttgcgtctcatcaattaaccgccgtttatcctttgccgcgtttccccataaaatgaagaccacatgtccccgatttgacaatgcagcaatcgccgcatccgttagctgttcccaaccttgtttacgatgcgaatttgattgacctgcccgcacggtcaatacggtgttcaacaagaacacgccttgatccgcccaactctttaaatagccatgctgaaccggttgaaagccaacatccgtctgcaattctttataaatattttgcaatgatggtgggactttgacccctggtaaaacggaaaaactacacccatgggcttggttcgggccatgataaggatcttgtcctaaaatgacgactttaacctgttcaaacggtgtccattcaaaggcttggaaaatatggtgcatctctggataaaccgtggtcgtttggtattcctgtttcaaaaaggtatggagctgaccataatagggtttggcaaactctggtgcgagaatcgtttgccactcattgtgaataattgttttcatctgctcacctcattaactagtttatcgtgttttaacataagttgctagaagaaaagtagcttgcatgctaagatagaggtaagtttctaataatacgttttcaggaggaattcctttgatttcaattattgcatctgatatggacggtaccttattaaacgacaaaatgcaggtttcagacggtaacatgaccgccattaaagctgcccaagacgccggcatcgaattcgtggtggctaccggccgcagtcgttctgaagccctccccctaattgacagtgatgacatccaacctactttaattacgatgaatggtgcccaaatttttgattctttaggtaatgaagttttgaatgtgccgattgattccgaaagggtgacagccgtcacagaaaatttacgcgaaaataatatttacttcgaactcatgacgactgccggtaattattcagatagcaaagtcagtcgcatccaaaatgtcgctgatttactcgtcaacctcaatcccgatacgagttataaaattgcggttgctttagcagcagcccgtttggaattaatgaatattaactacgtcgatgatcactatcaagggattattaacgatccaacggttaagattcttaaaatcatcgcttttagcacacagggaatgaccgaattagcaccaattaaggcattttgtgaagcccgcggggatttagttgtaacttcctcttcaagtaataacatcgaaataaaccacattgacgctcaaaaaggcatcgctttggccgcctatgctgaacaaagagggattccagttgagcaaacaatggcaattggtgataacttaaacgatttttcaatgatcaaaacagctggcattggtgtcgccatgggcaatgctgtcccaacaattaaggaacttgcgaactatcaaactgcaactaacattcaagacggcgtcgcacaagcgatttatcacgcgattgacttgaatcgtacagctgaaaagaagtgatctttgatgcctattttctacattaaacaccaggctagtgcttcacgtggtgtctcaaccgtgattgacgatcaagaacaaccgcgttatttacttattggaaagcgtgggattcggcatgacgtattcagcctttactcactcaccggcgacttactcggtgaaattcgccaagtcacaattagcccctcacctgactttgaccttttccaaaacgatgaacggattggtcaactcaaaaagatctggggcgtctggcatgagtttatctatgtcaaacaacttaattggttaattatgggagatttaacgcaaaatcaatatcgcattatctaccatacacaacccatcatgcaagcgaccaccattctagcaagcagcggtccagcctttcaattgactgtcaaccaagaaaaggatatcgtcccctgtattttgattgccgccgttttaaatcattgggcctataaccaacccaaggcactgattcggcgttttaagcctagtttgcgattcgaatagtcagtaaaaaaacgactaatcaaatgattagtcgttttttggtctagctcaagactcccatcgaatatatataagcgctaacatttaaaattaaattgattcttttcttttaaattggtatggttgaatatgcaaacttaaaattaaaggggtcttctcaatgccaactggcgtgattattaattcattatccgtcttatttggcggtctattcggtagtttattgggagataaattatcaactaaatttaaaacagaactcaccttaatcttcggtgttgcttcgatgggaatgggcatcaatgccattattcaaatgaagaacatgcctgcagtcatcttcgcagttgttctcggtactgggattggcctactcattcacttcggtcgctggattgatcgcggtgccgtcttgatggaacggccaatttctaaatttttccgcgtaaaaacaatacgctatcagataccgaatttatttcagcactcgtgacagtgattgtcctcttttgtgccggtgggaccggtatttatgggacattagatgctggtatgacaggcaacaatacgattctaatttctaaatcaattctagatttctttactgctgccatctttgcctgccatctttgcctgcaatcttggctccgtcgtttcaaccattgcgattccgcaattcattatcttttacatcattttcttactcgccaaactcattttcccactaacgaatccaacaatgcttgcagatttcaaagcttgcggcggcctcttgatgctcgccactggctttagaattgctaaaattcgcgaatttccaattgcagacatgataccagcaatgatcttagtcatgccactgagctggctacggacgacaatgattatgccattactttaaaatcaaacaaaaaagacggtcaaattcacgctgaattgatgaagtgaaccccaaatattggacgaaactttaagtagctttctgggttgtaaaaattcgatattcaatcggacttttacaacccagttttgttttaattcttgaaaaattataatcatcaatccaaaccgatatttgtgaaactagcgtttcataagtatcggtttctttttggtagaaagcttcggctttcataatatggaaaaagctctccattgctgcattatctaaacatgttgctttgcgagatatactttgaaaaatgcgatgttctttcaagatatgagtccaatcttgatgctggtattgaaatccttgatctgagtggactgttgtccggtattttaaattcttagggattttcttaactgctcgattcaaaacagttgtagtaaattcaacagtagggtgtttactaacttgatggctgagaatttcacctgagaataaatcataaatacatgtgaaataggcgcgttcatcaattgtcttggttccccagcgaacttcagtaacgtctgttactagtttttgataaggacgatcagtgaagaaacgacggttgatcaagttcttagcaacggtgccaacattgcctctatatgaattatatttacgagtacgtttgttaaatgcagttgatagtaattgcagttctcgcattaagacaagtacttttttatgaggcaaattctataattaatccgaacagaaattaaaaagcccaaagcaatcacttacaatggtagtaactaattccaaccaatatagggagtgattactttgggtacatctactttatcacgttttcaacgtggcgcactagcacaactggtcaatgaggggaataaatcttaccaagtaatggctgacgccttaggcgtcgccaaagctacgattagctatgagttggaccgagttaaaccttatgatccagaattagctcagcaagatgcagatcgcaaaaggcggaattgcggtcgtcgttcgatgctgacggcagcattagcgactttaattaccaatcacttacgattaacctggtcaccagaaaccattgcggccgcttataacttgagcactgcgtcaatttataattggcttaatcgtggctggctccccttcaaattgactgatctacccaatcggaatgtccgccagcaccgagtgagcgaaaatcgtgggaaatttacaagtgggacttccatcgaacaacggccaacaactgttaatcaacggttagcttttggtcattgggaagtagatacggtgctttctagtcgaagtgagtcacgatcatgtctggttacattcgtagaacgtaagacccgacttctatgggccatcaaagcccctaatagaacggctaaggctctaaacaccgcctttggtaagtttatgggggccttcggtccccaagtaaaatccattactgttgatcatggtaaagagtttgccaattatcaggccttagaacaggattatcagatcaaagtttatttttgccatccatattcaccatgagagcgaggttccaatgaatattttaatagacggttacgctggttcttcccgaaaaagaccaattttagccaagtaacgactgatgagatcctagcagcacttgaactaattaatcaacgaccattaaaaatacatcatcaacagactgccattgaaagattccgggcttgttcggattaaacttgtaatttgccatgttttagaatatttggtcaatataaaaacccccgatattggattttggtccaatatcgggggttcacttcatgatcgtcttttttaattgattaaattgattaaactgaataattaattaatcactaccactatttttgaccttcaggtttcaaatcaaagcgatgtgaaacaattccgtataaaatccaacctgcaaatgttactaatgaaccatatgcaagttctctgaagccaaccgcatacaatgcgtacaagctataaatagcagcaaccattgcaattgcatttgttatcttcatcgatttaggtgatactttggcatctaattgcattgtctttaatgctcccatcgagagaagatatggaataacattcgtaacaaccgctaagtttaccaataccgtaaattgttttgaaagtgatggactaatcgtcattaatgataataaagattgtaaagttgtaataatgaccatcccaacgattggtgtgccattaccaactacttttccaaatactttagggaaatagccttcaacagctgaactgcggaacacttcggcaatcgtaaattgccaacctagtaatgaaccaaaacaagaaataaccattaaggcaagtacaatactcccaattgttgggttaaacatttgactaaatgcaaccccaaatggcgcatttgatgctgccaaaacactgtttggtacaatcccttgcatgatgtttgttgaaataatatacataattgcagcaccaattgtcccacctaaaacggcaattggaacatttttcttaggattttcaacagaatccatattagctgatgcggattccaatcctaagaacgcccataatgtaattgaaattgatttactaatcccattaaagaaacttaaatgatgtggattccaagcattagcgtacattgtgccactaaagaagaaccaaccaccaattgaaatcacaacaactggaataataacaccccagactgtaaatgaactaatcttaccagtaattttagcaccaccaaagttaagtacagttgctaaccagagtgtaataattgttccaatcgctacctcaactgggctcaaatgccaatggaacaacactgcagcgtaaccaacagctgaaattgcaatggcagcattcgcaattactaacgaaacaccatatgtgtagtttgccatgaatgaaccggctttaccatatgagtattcagcataaccgcccataccacctgatttcttagtgtacataccagcccgtgaaaaggcgtatgccaagcacatcgcccctgttgctgttaccacccaagataaaatagacattgtcccgacttgcgctaaattagttggcaacataattatcccagaacccatcatattgatggcagtgataattgttaactgtataacactcatttttttcccatcttttgccatttaactcacctcatcataaaaataaacgtagtgtacatcagaatgtgcactacgtttaaagtttgtttgatcattatttatctaatacataaccaaatgcagtagtataaccatcaatatcttcaaaatagacaccttgtatttctggtgcaaatccagggaacttgttaatcccttcttcaagaatcaagaagtatttttgagctacttctgaccatctttcaccaggaacaacacagaaaatacctggtgggtaaggaagtgccccttcaagtgcaatttctccctgaatgtcctttaatgcgactaacttagcgttattccgcaataattcaacgtttgcatcatatggtttcattgcttgttctgggaagtgttctgctaagaacatcttcttctgatagtcctttgcattattttctttatagaaatcatgcaattcttgacacaattgacggattgtataaccattatatctttctttatgtgcttcatataacgaaggtaatacatcttttaatggtgcatctgctttaactagggcttcaaacttaataatttgtgaaactaaattatccatcttagctgatgtttcagcaggtgtcatcaagaatagaattgagtttaaatcattcttttcaggaataataccatgttcacgtaaataattggcaagaatggttgcaggaataccaaaatcttcgtattcaccggtttcaacatcaatccctggtgttgttaacataaatttgtttggatcaatgaaatattgattattttcatagccatcaaatgcatgccattttgcacctttttcaaaacgccagtagtcgatattattgacgatttcttcagtatcagcatcttcccatttcttaccgtttaccattggtggtaagaaaggtttaatcatcgatgcattctttaacaaactcttccgcgcgttaacggaaacaaccaaagcatcatgccataatcgcttaccagcttcgccatcttgcatcttcgcattaacatccaatgttgcaaacaatggatagaatggtgaagttgacgcatattgcatgtaagcattattgaagcgtttgtggttgatatatctcttttgacccttgatatgtgaatcttttttatgaatttgtgatgcttgtgaaaatcccgcttgttgtttatgtgttgattgtgttactaagatacctggatcttcaggtcctaagtctagtaataatggtgatgaatcacgcatcattggaataaattgttcataaccaacccaagctgagtcaaagaggatatagtcacaaagatgaccaatcttttcaacaacttgttttgcattataaattgttccatcataagttcctaattgaataacagctaaacggaatggtcgtttagctttagctttttcaggatcaactttagcgatttgttggcgaatgtagtcttcatcgaaatctttagcgtaaataccaccaataaagccataaggatcacgtgatgtttcaagataaactggacgcccaccatctttaactaaggctgcattatagattgatttgtgattatttcggtcaaataatactaaatcaccgggcgcaattgcagaagtgatcgcaatattatttgaagttgttgtcccgttcattacaaaatatgtcttgtctgcattaaatactttggcagcatgtttttgtgcatccattgcgggcccttcatggattaataagtcacccaaatcaacatccgcattacaaatgtccgctctaaaaatattttcgccaaagaagtcgtataactgtcttccggctggatgtttacggaaatattgaccaccttgatgtcctggacaatcaaattgaatgttgccacgatcaacatatgctgttaattctttaaagaaaggtggtaaaacaccttcttcatatttagtagcagcagcttcaatttctctattagcaagtctgtaatcgtattcatttttcgtatcaatgatatggaaaatttttgccattacatcctttccgattgttgaactgttatcagtaacaataaaaattgggatatcaaattttgtatcatcaacagttgttacatattgcaaatcagtatctgataaaacaacagctgcgacatccacaaaatcggtattctcaactaatacggtttgccgatccgttgaaaaaaattggtttaaatcagcggaaacagcaattttcatttttgtcatgtctgtaccctcccaaatctctactttgttaaataactaacacttatgttttaacactaatgtaaaagtactgcaagggcgttttgtgagcgctttctattttcgcgatgtatacatattaaaatgaatgcttactgtcaataacttacactaccattatttttatctaatagccgccattccggacattaactctctaagaaaaaggagaaaaaataaaaagtttaataaatatattatttttatacatttattaaacttttatatttttttattttcattttaaaccagctattttcattagttgctttctaaaataattcatgctattttaattcattcagtcagccaatctcgaaaataccattcttcaattctatttccactcggaaataagacataatagcaagacccactgaaattagttcaattattggtaaacttgcccagacaccgctcattccgaagcaaagcgcactgattgttaatacaactgctactaatagatagccacgtacaaaaactaatgcaagtgaaatgcgtgtcttattaattgatgcaaagaatatattcaaaaccacgtttatccccgagaaaaagatacttaagaaatagattggcatcccgtcactggcaattttaatcacttgcgcattattttccgtattaaatacgccaataatctgcgcgccaaattggaagacaataaagtatgcaactatcccaatcactaatgcgcaagctacgccatatttcaatacaaacttaatttttggtaatgcatgctctgaataggagcgacttacaagtggttggattccctgagcaacacccgtaaaaatggcaagcaccactaataaaatattagtagcaatcccgtatgctgcaacacccatattgccactaatatgcaagataaccaagttaaatacaaaaataccaatcccattgctcatctctgttaaaaacgagggtaagccaatttgaattgcactactaataattttaaaatcaaatccataccagccgattgttaaatgattatcttgcctaaaaaagtgactaagaataatcaaaatactaatcattggagataaacttgttgctagtcccgcaccgaccattcctaattttaaaacaagtattaatagccaatcgagtaaaatattagtcaagctagagataatcatcgctaccatggctatcatggtcccccgatcattccgaacgaacgataatattaaattattaaatacaaaaaaaggaccacaaattagtatgattctgacataacttaatgtatgttgccaagtctctccatctgctcccaatatcccagttattttcgacgcaaaaagtagtccgcacatcgagaaaaaagcgcccaataatagcccaatataaaacatttgcgtaaagacacgattggcaatctttggattgctaattttatagatggtaaaaattgtcgcgccacccattccaagtagtaatcctaaaccttccatcaagttaaaaagcggcatcgttaagttcataacggtgacccccagaacaccaattcctttagcgacgaagaaagaatccgctaaaacataaatcgacatccccactgcacttataatcgctctatagacatattgattgagttcagccaataagccttttcgcctatccatactatcctacgacctctccaaaatagttgatcactactcccattataccacggtattggattagcctattttacggatcatatgttcatattgatgattaccaatcatcaattccccaacgacttgataacccattttttcgtataattttttggcacctggattattaaaatctacatttaaactaataatctgtttgtgattagccttggcaactgattcacatgctgccaatagcttagatccgacacccttaccacgtgcttgtggaacaacggcaattgtatcaatatgccattcacctggctgtgcctccttatcattaaagaaacgcgttgtttcaggtaagccaatttgtggaaacaacggtgcaagggcatcatcaatatgagcctctttttcctcaggaaagctaacaagtatgcccaaaatctgaccatcctcttcataaactagtgtgttagcataactataccgatattcaggcattgcaaaggcctgttctaaaatgctaaacaaatcctctagcggaatcttttggaagagtggcatttccatttcttcaaaaacaacattaataattggcaagacactcttgtcatctgcaactgttgcttgacgaatcattcaaaaacctcctctagtaatctttttatcatacgggggattgcatagcacgtcaactgttatcatactaaatcagatcggtaatcggccattttcttagcaaataactcaccattggtcggtggcgtgtacgtcaatgcattcgcacccgcttcaatcgtcgctaatatactagcttcgtttttacccccagttgccataatcggaatttcgggatattgttggcgaattgcactaacaattgctggggttttagccgcgccactaacgtttaaaattgaaactccagcttcaatctgcgcggcataatcctgtcgttctgacacaacagtacaaataatcggaacgtcaacaacgcggttaatcattttaatcgtctccaccgaggtcggtgcgttaaccaccacgccaatcgaaccggcggcctctgccaataatcccatgtacgcggaccggctgccggccgttaagcccccaccaatcccattaaaaacggggatcgtcgccacattgctgatggcattcatgacagctgggtgtggtgtaaatggataaactgccaaaacagcgtcagcatttgtattattcacaatcgcaacatcggtggtaaaaataattgttttaatcttcttaccgaggatcttaatccccccaacttgtcgcgccacagcaggtggtccgacaacactggtttttaatggtgtataaatctctggtacgaattgctctgtcatccgaatccccctctttattctgttgctttaataatggctactaatcgttgttctagcgcgaccaaatcaattgcatttaatcgcgcaaaattgatgcgcaacgcatctgttttaagcccaaataatgatcctggtgcgacagcaagctgatgatcaataaaggtttttaagcgtaatttatggttcggatgggtcacccaaatataataacctcccgctggtaagtaaacgtgccaatcgggtaataccctttcaagcatcttataggttgcttgtgcacgttcttgaagcgtccccttaagttgatccaactgcgtttgaaattgcggatcccccatcgctaaggtcaccatgacttgcgccataatgcttggcactaaatccatttcatgttgcacgcgggtcaactgttcgatgacttgcggagtagcagctacccacccgattcggctactagcccccataattttggacaacgaactaatataaataacattatccggatcaagttgctttaacgttgggattggcctagttgtatcaaatcctaaccaaccaaagacatcatcttctacgattggtatttgatgcatctggcataaatgaacaactgcttttcttttttgaaaactcattacgtgccccgttggattttgataatctggattgagaataaccaacttaacacggtgcttaatgattagctcttctaaatcagtcaaataaatcccatcagcatcaactgaagcttcatagacacggacacccgtcgcttcaaacaaagttgagtcatgaaaaaaggagggtgattcaattgcaacagcatcacctggcgtcaataaaccctgtaatattaaaaagagtgattgttgcacaccggcagtcattaataactgctcttcggtaaaaaatagccgtttattgtgttgatccaattgattaattgccgtaataagtggttgatagcctcgtggtgtctctaatgcttgtgcagtaataaaatcttgccacgtcaatgcaggaaattgaaattgtgggactaattctaatggtaagtcacttgaataaacatcaattaacttttcaggttttcgtctaatcagttgttgtaattggcgccgttcattttgactttgtgactgacgttggctgatcaaataagtatgccaattgacccgccttgcctgtggtcgcgcttgctggctgacaaacgtcccgctaccaacgcgacgttcaatcacgccatctgcaaccaattcatcagacgcacgtgtcaccgttgaacgattgacactcaataatttagctaactgacgctctggcggtaattggtcacctgaacttaattgtcctttatctatcaagctaataatcatttttttaattgccatatactttggcttttgttcaggtaaatattgtaaccattcaatcatttttaacacctcttatttagtttacaaattggatggtaaaaaaacaagccaattggctgttgttgaacattctattcttctctatgatagtcaagaatagaattttggaggacaactatgcaaaacattctaaccattgccggctctgatactctgggtggtggtggcatccaggccgatttaaaaacgttcgaagccttagaaacgtttggggtcagtgccttaacttgcatcgctacattgctaccagacggtcacttgaaaatccacaacttacctgaggataccattttggaccagcttgatgccattttaaactacgtgccactaacgcacgttaaaattggtttggttcatcaaacggaaactttaaaagccatctgtgagcgactacgacagcatcctgaattaaccatcatcgctgacccggtcctcgtctttaaagaaggcgccattcttgcgcagcaagcgtacctcgacacgttaaaaaaagaactactgcctttgacgagcgttgtcaccccaaacttgttggaagcccaacaactcagtggtctttcgtcaattaccacgcgtgaggaaatggtcgaagctgctacaattatccaatcatttggccccaagcacgtcattatcaaaggtggtcaacgattccctggtgagcaggccgttgatttattaaaatcgggcgcaacaactcattatttagaagctccacgattggaaacaactaccattgatggcgccggttgtacgctttcggcagcgattgcggcggaattagcacaaggaaaatcgattgaagttgccgtggcacgcgcaaagaaatttgtttatgccggtttaaaagatggtattcatctacgccatggcctggggaatgtctggcagggggctactaaacatgcactttaataaacgtcaattaccattactcgcgatgctcaccgcattgaccgtggcactctctttgttaatcatcatcccgattccggcgacgaagggctttgtgacgctctgtgaggtcggtatttatacaacggcgatcatgctgcgaaatcctggcggactcactgtcggagccctgagtggcctattaatcgatctattatctggttaccctgagtggtgtctcttctcactcatcattcatggggggcaaggcttcgttgtaggtcacctgactcgtaatgattcaatgcgaccaaagcagctgattatccccctcatttgcggtagtatcgtcatggttgccggttactttttagctaccagtttacttttcggctgggctgccggaatcgcttcgattttcagtaatattgttcaaaatggacttggtatcgtggttaccatcccgttagtcactagtttatcccgtattcgaccacaattatttaaccactaggagattttttaaatgacaaacgaattacaattaaaccaaattcaacaagacttaacaaagatgactcaggatgttctaaacgaagcacacttaggaaatggtgatttgttcgtcctcgggtgttcaacgagtgaagtcgtcggtggtcatatcggtaaggcttctagcaaagaagtcggtgaagtcatcatcgcaacacttcgtggcattctcaatccattggggattcatttagccgtgcaaggctgtgaacatattaaccgtagtttggtgattgaacgtcaggttgcccgcgcacacgactttgaaattgtctcagttgttcctgctatgcacgctggaggcgcctgctccgtcgctgcatttgaacaattcagtgatccggttgaagttgaacatatcgttgcacaagctggattagatatcggtgatacggcgattgggatgcacgtgaaattcgttcaagtccctgtccgcccaacccttgatacattgggtagtgcacatgtcacagctttacggtcacgaccaaaatacgttggcggtcctcgagcaacatatgcaccaactcattaaacgcaaaaaaagcctcgttctttgaacgaggctttttgaatattatttattcaaccgtgacactcttagctaggtttcttggctgatctacatcataccctctatgcaaacttgcatagtaagcaattaattgaccaggaatgatccccaataatggtgtcaataagtcgtttacggttggtaaaatgatctgatcatctgcttcagcagattcttcgctgacaatcgtcaaggcttttgccccacgcgcagtcacttcttgtaagttaccacgcgtgtgcgcaatcgttttggcatccatcaagaatgcaataacgggtgtcccctcttcaatcaaagcgatggtgccatgttttaattcgccggctgcaaatccttcagcttggatgtatgaaatttcttttaacttcaaagcagcttctaaactcaaggcgtaatcttcaccacgaccaatataaaaggtattgcgtgttgtttgtaagtaatcagtcgtcaaggtttcaatctgttctttttcgctcaataaagcttccatgccagtagcgactaagcctaattcatgatgtacatcgaattgttctgctagcaccagttgattgtggcgtccaagcgcaacagccaagaataattcaactgcaatttgtgcagtgtaggctttcgttgaagcaaccgcaatttctgggcctgcatgcaataataatgtgtaatcagcttcccgtgaaagtgttgacccttggctgttagtgatggtcaagcttggataatgcaaggcattagtttgtaccaacacttggcgactatcagcagtttcgccactttgtgttaaaaagataaagaatggcttttcagataatagcggcatgtgatagccgaattcactagcaacatgtacttcgacaggcttgtgcgttaatgtttcaaacaaggtcttcccgattaaaccggcatgataacttgtcccagccgccacgatgtagaggcgatctgcatcattcattgcactgagtaacgctgagtcgattttaagctctccatcaacagcaacgtattcgttcaataaacgccgcataacagctggttgttcgtcgatttcttttaacatgtagtgtgggtatgtgcccttgcccactgcatcagcatccatttcaacatgatagctttcgcggtgaataaaagtgccgtctaaatcttcaatttgaacactttgtttcgtgagtgtcaccatttcacgatcatggatttcaataaaatcttttgtttcattcaacatcgctaatgcatccgagcacacaacgttaaagccatcacctacaccgattaacaatggcgatttattcttagcaacgtataaggtgtcaggatcatcacgatcgaccatgacaaatgcgtatgagccttcaatcaacgttaaagccttccggaaggcttccttagctgataattgttctgtcttagcaaggtaagcaatcaactgaacagcgacttccgtatcggtttgactgacaaaatggacatcctccaagtatgtttcttttaaagctaaatagttagttaacacgccgttgtgaaccaagtaaaaacgaccatcttcagaaacatgcggatgcgcattatcacgactcgcaacaccatgcgttgcccaacgcgtatgaccaacaccgattgttccttgtacttcaggcccaaccgctgcttctagaacgctaattttaccgggttctttaactaagtagtcctgcccagtttcgctgttcacgtaaatgcccgctgaatcgtaaccacgatacgccaacttctctaatccgtttaataaaatttcagttgtcttttcattgccaattacgcctacgattccacacattataaaaatcctcttttcaactttggtttaatattctttaatcaattggtacaacacttaaatataatagcaccaacgattttaatgtcaacatttttattggtatatataaatttataattttggtatagtccaaatattttccgctatctagcgcttttatgctatactaagaccagtcaattttagaaaaggagtttctgtaatgaaaaagagcatcttgttaattcgaagtatttctcttcttggcctattagtcggactgagctttatcgtcgttgcacctaaaacaatcgccttacatattgccgccaataacattgtcgattcaaccggtagtaaatacatgctactattagaacccgctttattaatcatcgtgaatgaagtcagtgttttcaatctcaaacgttaccgcaaaaattatcatttgactgatgcacctatcatacttgtcaaagaatggtatctgatatccgctgctgttgtcttattggttgtctttggttttctgatgtacgaacaagtcacattgcgttagaagaatgggctcttaaataaaattgcaccaaaaaaacccgtcaacacaatgttgacgggcttttttagtttgattcaagtgagaacgtgcttttcaagctagtgctcaaaagttgaccaacttgaacgcgcttctcgagtagtcatttccggtgaactgcaaaatggggattatggcaagaaacaccataacccccattttactgttaatcctcaaagcctaaccaactcgcgtcagcactccctttaattatgcaccaatttcagctttaacaaccgctgcgatttgatcagcatattgatttactttttcttctgttgcagcttcacacattactcgtagcaatggttctgtcccacttggacgaaccaagacgcggccatcaccattcatttctttttcaacggtatcaatggcagcttggatcttgtcatttgttaaccaagcatccttgtccttaactgttaagttaacgagtttttgtgggtaagtttgaacaggggctgctaattcagataacttcttaccagtttgtttcatgacgtttaagagttgaatcccggttaacatcccatcacctgtattgtggtaatcaaagatgatgatgtgtcctgattgttcgccaccaaggttatagcctttttcacgcatttcttcaacgacgtgacgatccccaacgtctgtttggactgattgcatgttgttggcttcaatcgctttatacaagccgatattactcataacagttgtgacaatcgtatcttgttttaaacgacccttatcagataaatattgaccgagaatgaacataatcttgtccccatcaataatattacctaattcgtcaactgcgatacaccgatccccgtcaccatcaaatgctagtccaacttgtgcgcctgtttcaagcactcttttagcaacattttctgggtgtgttgaaccgacaccatcgttgatattcaaaccatctggatgggttgccgttgttgtaaattctgtttctagatcagcaaatacgcggctaattaaaccactggttgaaccgtttgcgccatccaatgccactttaatcccagctaaatcatcaggaatcgtgtgttctaagaattgggtatacttcaaagcaccttctggatattcttccaccgtccccagaccagcgccttctggacgtggtaaagtatcttcttcggcatcaataattgcttcaatttcttcttcagttgcgtctggtaatttgtaaccatctgcgccgaagaatttaatcccattatagatagcggggttatgtgaggctgaaatcataatgccggcacttgcttcttgaaccttaattaaataggcaaccgcaggtgttgtcaccacgcctaatgataagacttcaatcccaactgataataagccggaaatcaaagattgttctaacatttggcctgaaatacgtgtgtcacgagccaccaaaacctttggccgttgatccttatcagcgtgcttggtcaaaacgtaaccacccgcacgtcctaatttaaaagccatttctgggcttaattctaagttggcaacgccacggacaccatcagttccaaaatactttgtcatatttaattatctccattcatcctgctaaaatctttagcgttgattattgatttacatcggtatttgctttactactttcacttgagcttgattgactacttgattggctgttacttgaacttgactcaacgagcgcactacttgatgtttgtgccgtactttcagacggcgcttcaacagtattagtagcactcgtattggtcgtatctggagtcaccgtaattgtcaccttaatggcacttggcgtactctcataaatgttgtctggtaaagccactttaaccgtctttgaagttgaactcgtgattgacgataaatcgacactcactggtaacgacgtcaacttggctaaagctgtttgacgaccatacacggtcactgaatcagttgttgatgacagactgtagctgtagccacttttttcaccggtcttttccaaactaatcgggagtgttttcttactcatttgaaccaatatcttaacgttaacggtttgtggtgaaattaaaacatttaacgctttcccattgcgatcaacagcttgcaacaagacttcttcattgatgtcttttttggtgccttcatcgggatcaacagtggctactacttgcgacacagcattcactgctgattttgcaccactgacttcaaccacgtcttgacttagttttggatttcctagactatacccggccgctaagttttctttcttaacattgacctgcacagggaattgctttgtcactttgtgctcaatgtggaccttaatttctttaggttcaatcgtgactttgatatctttattaatccccgtctgttttaacttgacggtgtgatcaccaggacccagcttcgttaaatcgccaatcacgcggaaatttaatgtgttaactgctgatgtgactagcgcattcggcccggataatttcactttgaccttttgtggatagccggtaatgaaataccgaccagtatctgcattaatctggagcggcacttttacggtttccgtgcgggttgctagcatctgtgtatcattgttattcgtctggcgcgtcgtgttaatttcatccaaattgacataaccaaacagtaacaacgctagaaataacgctaaaattcgatagagccatgggccttcaacaaactttttcatcatttctggcctccttttttgaagccatcaacaaattcttgtaagagactcgttttgttttcctcttgggtaatcaaatgcgagttgaagtacttcatataatcatcacggcttaaatcacgcattaactcgttattgcgcgttaatgtgacaccaccggtttcttcagaaacaacaatcgtcaaagcatccgttacttcactaatcccaacggctgcccgatgtctggtccctaattctttgggaattaaattactctctgaaagtggtaggtaagcggccgcaacggcaatcttatcatcgcgaattatgaccgccccatcatgcaatggtgtattcgggataaagatgttaattaataactcccccgtcacatccgcatccaaatcaatcccagtttcgatataatcttccaaaccggtattcatttgaattgtaatcagcgccccgatacgccgtttcgacatatactgaatcgacttatcgagggctttaattaaattattttcttgttcaatcttgggattaacgccgcgtcgtagtagcgatccacgtccgatatgttccaaaccacgtctaatttcgggttgaaaaataacgatcaacgcaatcacaatccagctgataaattgatccataatgtacgaaacagttcgtagaccaatgtaccaactgataaccttaatcagcgcaatgactataatacctttaaacaattggacggctttggtaccgcgaatcaacatgattaatttatacacaaaataccagacaacgatgatgtctagcacatttgcgagcatccgccacgttaataactgtgaccattcaaatgacataggtaacctccatccaaaaaaattctgtatctattataccatgaaccatttcaatctgctcattgtacttttaatgttgcattttaaactctaaaaataaatcattataacggccaaccgcagttggtgataaatcactataaactcgcaagcgatcgatcaccttttgacttggataatagcctgggttattccgtgttgctgctggcaagagtgctttggccggtatattgggcgttgaataaccaatatattcagcattttgagccgcgtttttgggctctaacataaagtttaagaaggcataggccgccttttcatgttttgccgtcttgggaatcactagattatcaaaccatagattgctgccctcttctggaattacatagtgcaaatggggattattatccaacatctcggcagcttcaccggaccaagtcacagcaacactcgcttcattttgaaccatatacatcttaatttcgtcagctacaatcgctttgacatttggtgccatctgatcaagcttgtccttagccgcctttaaaaccgccggattcgtgctattgactgactggccattttcgatcaagcccacggccatcatatcccgagcactatcgactaccataatttggccgcgataatctggtgaccatagatctgaccaatgtgtcagtggttttttaaccaattgatcgttgtagataatcccgagtgtgccccagaaataaggcaatgaatacttattcccaggatcaaatgattgattcaaaaaatccttgccaatattttgatagccggttaagcgacgatgatcaatcggtttaagtaagtgtgctttgcgcatcttttcaatcatgtactcacttggcaccgctaaatcgtaagcagtcccaccctgcttaatcttcgtgtacatcgcttcgttgctatcaaacgtctcaaccgaaacatgataaccagtttgcttttcaaactttttaataagtgctgggtcgatataatcgccccagttatataatgttaatgtattatttttcgtataaccttgtgatttttgtaattcaaccgtcccaaaccaaagggctgcacagaccactaaaatcgctaaagtgatgcgtcctaatttattcattttaagcccccgctttccgtttacgccgtgctttttgggcttggcttctttgattcaataaatagtagccggccacaaggattaaggagaagacaaacatcaaggcagataatgcgttgatttctagactaattccttgacgcgctctggagtaaatttcaacggagagcgtttcaaacccgttcccagtgacaaagaaggtcacggcaaaatcatctagcgaataggtgaacgccatgaaaaagcctgcaaaaatgccggaactaatgtacggtaaaataactttactcaggacttgccagtcagtcgcacctaaatcacgtgccgcatcaactaatgctggccgcatttcatttaacttcggcaaaaccatcaagacaacaatcggaattgaaaaagcgatatggctcagtaaaactgaaccaaagcccaaaccaaaacctaagaacgtgaagaaaattaaaaaacttgccccgataatgacatcgggtgaaaccattaaaatattgttcagcgataaaatcatattgcgcacacgccgttgcttcgttgaataaatccctaacgccccaaacgtccccacaatcgtcgcacataaagatgatagaatcgcgattaataacgtttgtaacacaatttcaatcatccgagtatcttcaaacaaggcctgataatttgcccaggtaaatgccttgaagccattcatattatccccactgctaaatgaatagaaaatcaaatagaaaatcggtgcgtacaataagacagagacaagcactaaccaaacgttttgccatttcatttttttcatttgttagtcaccttcttctttgctttttgctccccggttaccagcatgattaagcccatggcgacgattaagaccaccccgatggtcgagcccattccccagttcattgttgtgaggaagtgttcttcaatcgcagtccccagcgtaatcacgcggttacccccgattagacgcgtcaacatgaataaggataacgatggaataaagatggcctgtatcccggctttaaccccagccattgttaacggtaagatgactttcgtaaaggtttgccaattacttgcgccaagatcacgacttgcattgaccaatgatggattcaattcttctaaactattaaatatcggcaaaatcataaacggaatttcaatataggtcgccaccactaagaaactgaaattcgtaaataaaatctgttgtggcccaatcccgaaccaccccaaaaaatgattaatggcaccatcttgactaaaaatcccgataaacgcataagctttcagtaataagttaatccatgtcggtaaaataattaataatagccaaagttgtttatgtttcgtttgatgaagccaatacgccgtcggataactgattaatagcgtaatcagcgtaattaaaaaggcgtaccataacgaatttaatgtcatcttcaagtaagtgcctgactggaaataggtcgtgtagttgaccaatgtcgcatgcccattgatatcaaagaaggactggtacacaatcaatgcgactggtgcgaggacgaacaaaattagccagagggcatatggtaagtaatataaccattgttttttacgcaattgccttagtcctcctcttcgtaactttcaagtcgtgcatcgaaatcttcttctgattccccaaaacgcatgatgtgcacgtcttctggttcaaagaataagccgactcgttgaccatctttagctgggttagttgaatgaatcaaccaccggttttgatccgcatcataggccgtaatttcataatagtcaccacgaaatagctgcgtatcaaccgttaccactaattggccttggtcaacggcaacaatgtctagatcttcaggacgaagcaccacttcaactgcttcgttgacccgcatcccggcatcggcacattcgaactgcttgccgaccatttcaacttgataatcagcaaccattttacctggcagaatgttactttccccgataaaatcggctacgaaatggttgatcggttcgtcataaatgtcgacaggtgtcccactttgcaacacgcgcccttcgttcataacaaaaatttcatcactcatcgctaaggcttcttcttgatcatgcgttacaaataagaacgtaatccctaatcgttgttgtaaatcgcgtagttcatattgcatatcttttcgtaatttcatatcgagtgctgatagaggttcatctagtagcaagacttttggttcattggccaaagcgcgcgcaatcgctactcgttgttgttgcccacctgataactcactaatttcgcgattctcatatccggcaaggcgcaccaatttaagggcttcaatcactttttctttaatcgctgcttttttaactttacgtagatttaacccaaatgcaacattctcaaagacatttagatggggaaacaaggcataatcttgaaaaaccgtattgacttggcgcttattggccggtaaatcgttcatcttctgcccttcaaataaaacatccccggcagacgcattggtaaatccggcgataattcttaaaatagttgtcttaccacagccagacggcccaagtaaggtataaaacttacctttttccaacgcaatgtcgatgccctttaaaatttggacatcgtcgtattctttaatgacatttttaaattccaccattggttgttgcatcttcttcttcgtcccctttatctttagcactctcagactcgttattagttgactaatatcctattaattataccgtttccgagacgcaatgccaattcaaagcgaacattgttgtataatgaagttaaataattatttagaaatgaggttgtaatcatatggtcgcctatcaagcactcgttttagaacaaaccgatactactgtcagtgccacttatcaaactaagttaacgccagacctcgctaaagacggggtgttagtcaaagtcgcctattctgatattaactacaaagaccggctcgctatgaatcctaaaagtggcgtcttacgtcactaccccatgacacctggcgttgattttgctggcgaagttgtcgaatcggataatccgttctttgaagcgggcgatcaggtgttatgtacgggttatgaaactggcattacaatcgctgggggctacgctgaatatgtcaaagtccctagtgaatggctctttaagttgcccgaaaatcttagtcttgctgaaacgatgcagtttgggacggccggtttcaccgccgcaattgcgctcagcaaattattacgccaagcctttacagccgatcatgacaccccactcttaattacgggtgccactggcggagtcggaagtttcgcacttaccatcctcgcgcagcttggcttcacaaatctaaccgcaactacgcgtgacttgcaacaaaccgattatttattgcaccttggtgcgacccatgttattaatacagctgacctaactgctggtccgcttaaagcgctcagccatcagacattcaccggggttattgatacgcttggcggtcctgttttagcccacatcttaccgcaagtttgtgccggcggattcgtagcaacttgtggcaatgccgctggtgcaaccctagaaacaacggtgatgccgtttattctacgtgggattaccttagccggaattgattcagtctattacccgcgcagagaccgtaaagaactctggcaattactcgccacgacgtttaaaccggaaatttggccaacagttaacttggtcgccttttctgatttagcccgagaacttagccaaaagacgcataaaactgggcgcgtactggtcgccttttaacccaaaataaaaagccccgctaaatgatttggcggggctttttatcgtctaacgacgttcaaattgatacttaggttcttcaagctctggatcgtaatcaacctgtaaatcataatcggcaaaaaaccattcgtccgattgactcgcaaaataggtgataccatctttaacaaccgaaccaattggctgctcaacagtagcgcgttccatgcccaatgaaaagccatcatgcacggccgtttgaccatacactttgccaaaaaagcggactgcatcccccgattgtaaggctaattcgtcgcgaaaccattgacttgctgcatctgacacctgaatttgcatgttgaactcctcctgattaatcgactagttggttcttaatcgcataaattgccgcttgggtgcgatcatccacttgtaacttcgccaaaatatttgaaacgtgcgtcttgaccgtttttaacgtaatgaataattcatccgcaatctcttgattactacggcctttggcaatcaagcctaagacttcacgttcgcgattagttaagtcttcatatagcttaggttcagccggatgtgttaagcgattcatcatcttattcgtcacttctggctctaaaaccgattgtccttgcgccgttttacgaatcgtattggcaatttcctcggctgtagaagtttttaatatgtaactggccgcaccggcttcaatcgccggataaactttctcatcatcgataaaactcgttaagataatgattttggcttcaggccacgcctttaaaatcgttttggtggcctcaatgccatccatctcaggcatcactaagtccattaaaatcgcatcaggacgtaatgcaagcgccttttcgacaccttctttaccattgacggcttgatcgacgacatgaatatcgtcttgaacccctaaatacgttgagatgcctaatcgcaccatttcatggtcgtctactatcaatacattaatcacttaattggtctcctttaatagtggcactcgaatttcaacactcgttccctggttaggcaaactaataatttttgccgtccctccaacactatgggcccgttcgacaatgttgtttaacccataactgccggctttttgctcagcattcgtatcaaacccggtcccgtcatcaattacctttagtaaaacactctgaccgagttgtttcaagtatacttcaatctcttgggccttcgcatgccgtagtgtgtttgacagcaactcttggacaattctaaataaattatcttcgatgccacttggtaacgttatgctatcaatgtcccatgtaatctgaatcgcaattttggtcttcaattcgttcaataactgaatgatcccatcgcgtaaactcttgccttccaaattaactggtcgtagatgcaagagtaaggcccgcatttctgattgagcctcatttaacacccgttcaactgtcgttaaggactgcaacatctgcgcgttatcagcttgtttttgcgcaacttcactgagtgccgacaacatcatcgtcgccgcaaatagttgctgactcactgaatcatgtaactcgcgtgctaaacgatgccgttcttgcgctagaatttcttccttggtttcaccagcaatcacggtcggccgatcactataactttgaatctcttgttgtaagcgtatcattttttggcgtaattgttcaactgtttgctcgattgacatcgcgtagtcattggtttcgctctgtctaatctgaaaaacaggcgattcatactgtccagaaagtaaaaattgtaactggctttcagtatgggataattgcttacgtacgacaagatagacgattgcggtaactaaaaagcctactgccattgcggccaccacaatataaacaatcagtggtacatagaataattgcttcgtggccaaactaatcagccattgttcctgatgcgtactgtagaaatacgcaaaaaataacgccactgaaaacagaagcgtcaacaaactcgtgctgatccatataaagctccgcgttaacttgctcatactaagatcacctcaagatcaccaatcattacgttggtaatgattttaaggtggcgactttcttcatcatagtttgtactatacaactgaatcgactcatttttcaaattatagtgctgattgtcgattgtcacactccctaacattgcagagtgatcaagatagacaccggtcccgacaggcactaaaatccgtgtctttccaaaccccttacggatgacaatatggttgtcattcttgggtaaaatggtgctccctaaatcgataattgtatcaccggcagcgaccgcgaagttaatatcatcccattcaaaaatgttattgccaattgtctgatgaccaaaccaactatgccgcttgactgttgtctttttcgcggtgggttccgtcgtattaacgggaataaattttttcttgcgccaaggggcattatcaaacaactgattcatattgcggctgctaaactgtcccattcggctatgatttaaggctaaaaagacgaccgcaacaataatcattaaccataacgagaaattaattaacagtggtaccgtaacagctacgcaaccgaccatcgttaacaaagtcgtccagacaccgattttacctttactacgacgtttgttggcccagactaagagtaaaatacctgcaatgatgaacactaaatttgcgggtatcgtaatcatctgccaaatgaacgtcccgaagataatcgcttctattattaaaaaaacgcgccagataaacggcatatttacggtcccctttcaactgattaatattattatacaagcaaaccagataaacaccaatccgtctcaaggctgattaacgaattaacggcaaaataaaaaagccacgggattgatttccgtggcttttttgaaacgtgctttttggctgcaacaacttctgcttaatctaaaattggcagtcatcctaaaatctggatgactgccaattttgtattaatgctcagttgctaaccgcacccaaaagcactctattcttaaacgtgctttttcgaacaaccttttccggttaactacaaaacgggcgtcatggtcaaaattcgaccataacacccgtttttacgttaatcctcaaagactaacccgttcgaaacgcactttatttaacttctgtaattgtgacgtgcatgtcgccgcctggtgtttgcacagctactttatcaccaacgtgtttgccaagtaatgcttgggcaattggtgaatcatttgaaattttaccactgaaggggtctgattctgcagcaccaacgatttggtaagtttcttcttcaccatcttcgtcgtctgtaaagctaactgttttaccaacagcaatttcatcagctgcgatgctatcaacatcgattacttctgcaaagcgtaacatattctcaacttctgcgatgcgtgtttccaatgagctttgttcatctttagctgattcatattcagagttttctgataaatcaccaaagctccgtgcaattttaatccggtcaatgacttctggtcgttttaccattttgagtgtttctagttcttcggctaacttttctttgccttctgcagtcattggataagttttttgtaccattttatccacctctttattttaattaataatactgactatcttaattactgtgtacgtccttgtcaaatctcaatctttaatcggcatttaggattgattgaatctttgttacaagtaaatcaatggccacgcgattattgccaccttctgggacaattaaatcagcgtaacgcttggttggttcaatgaattcatggaacatgggttttaccgtcttaagatattggccaaccacatcatcaaacgttcgaccacggctttccatatcgcgatgcatccgtcttaataaccgaatatcatcatcagtatccacataaaccttaatatccatcaaatcccgtaaccgggcatcagccaatacaagaatcccctccaagataataacatcttgcggttcaacccgttgaatttcctccgtccgattatgaattttataatcatagaccggttgttcaatggcttgatgattttttaacattgatgcttgttcgattaataaatcgttgtcaaaagcatctggatgatcataattcgtttgttggcgttgttcaaacggaacatcttgccgtttgtaatacgcatcttgtggtaataacatcactgagtgattcgcaaatttttgggcgatagcctggctaacggttgttttcccgctaccggacccgcctgtaacgccgataatgatgggtgcttttttttgactggacatgggacgctccttttattctcaacttctttttgggcaaacagaagtcgacctccaatggcggtcgacttcgataatcctaaatgaacctaatcttcaatcgaatctgttgtatcgttatgttgttcgaaggttcttgagtaatatactttacctgtcttcaagttagcaacaaagtagagataattttgatcacgatcagctggattcaagacggctgtgacagactgtaaactaggtgagttaaacggtcctgggccataacctttattgatatataagttatatggtgaatcgactttagtatctttgttataaaggtgtgtcttgtgggtatttaatgcatacattactgaaatatcagattgaattggcatatcgatgtctaaacggttaaagaagacaccggcaatcttttggcgatcgacggctgtgaccccttcacgttcaaccaatgaagctagcgttaacgtttgttgaacggttaacttcttatccttaatggttgcataataaggttgcatcttttgatccatcgttgaaaccatttcggtgataatttcttttaatgtactatctttataaacttcgtaagtggctgggaaaaggtacccttctaagtgatagcggacatccttttgagccattgttgatgacaataatgcagggtatttcttctctaaacttgctaagaattgcttatcattcgcttgtttgatgaaggctgctttagagaattttgtttgtttaccaacttcggccgcaatttcttctaaagtgaccccttctttaactaacaatttgcccttcacatcgcgaggacgggttggtgtgccttctttttgtaagttagagatgatcttatctaaccccattgattgtttcaacacatgataaccggcttggaaatccgagaaattatgagtcttcacataataattaaagactggcgcgcttcgaattaattttttatcctgcaaaatagcagcgatttgtttattcgttgagccgttgggaatgcgcacggtaatttcttgttttgctttggtgtcgtatggtttaagagatgcttgtacgtagcgatatcccatgaatccaataatgacaacaagcgctaatagaataccgataatccaatagacaattttatttgctgcttttttttctgcacggcgttcttcgtacaatgattgtgccgctttttcttgatttactggctccttttgatcaactttcttcaaaggatgacctcctaattgctcttttaaatacaatccttaaaacattataccaaattattcaaaaattgcattaaagattcgagattaacggattttggcatcaaaagtagcaactaattcagcgactactttttcaaaagcagcgttaacttcttcttctgttaaagtagctgcctcattgaggtacgttaaggtgtaagccattgacttctcaccagcctcaatatgactccctgcgtaaacatcgaaaagttcaactgaaactaagtgggcgccaccctttgctttgatggcttcaacaattgcggcatttgaaacttgatcagacacctgaattgcaatatcccgcgttacttcagggaatttaggtgctggtttagcaatcactgtttgggttggcaaggctaggatttgtgctaaatctaattggaaaacataagtttcttttaaatgattagctttcgcaactgctggatgaatttgaccaacaaatccaaccagttgttcaccaacgtaaatggctgccgttcggccaggatgcatttctggataagcttgtgttggttgataactgattgcatccgctaagttgtaacttgccatcaacatttcaaccacacctttgattgtgtagaaatcaactggtgctgcggcagcttgccaagtcttcatttggcgattgccactcattaagccagccacatattcaatttctgttggccgaacttggtcgtctgcttgttttaaaaatacccgtccttgttcgtatagtgcaagatcagtttgtttacgtgccacattgtaagcagcatcgtccaataaaccagtaatcaagttcatgcgtaagtgcgcatgatcttgcgtcattggccaatcaagtgctgtcagcgccgaatcaacaagcgtaaattgacgcgctttttcaggggtcgttaatgcataactaattgcttgcgttaaaccagcaccttcaagtgtatgccgggttttacggagtgccttttgttcagtcgttaatgccccggttgtcatatcgccagttggcaatgtgcttggtaagttatcgtaaccgtataaacgagcgacttcttcaatgatatccgcttggatttcaatatcccaacgccgtggtggaatcgttactgttaaatgattatcagtattgaccacactaaaaccaaatcgttctaataattcaacaattgtttgcgttgcaatctctgtgcctaagacgcgattaatccggtcagcttcgatttcaatcactttgtcagttggcactaagttagttgggctaactgtaccagcagtcacttgcccattaccaaggtctgccatcatcatagcagcagcatctaaggctgtttgaacatcagcaacattcacgcctttttcaaaccgtgatgacgcatctgaacgcaagttatggcgttgagccgttttacgaactgcagttggtgcaaaaactgcggcttcgataatcacatttttcgtatcagcagtaatttgtgagttcaaaccacccatgacccctgctagcgcaattggtcgatgaccatctgtaatgacgatatcttcatttgttaagtcatgtttgccttcatcaagggtcgttaatttttcgcccgtcttggctaaacgaacttcgatttgtttgtgatcacccgttagagcatccgcatcaaacgcgtgtaaaggttgcccatacgttaacatcatgtagttcgtcacatcaacaaggttattaatggggcgaatgccagcattccataaacgcgtctgtagccacattggacttggttggacggtcacgttttgcaacatacgcaagtgataacttggtgctaattgttcatcagcaacttgagcagtcaattgatcagctgtttgaacgttgctttcagtcactacgatatcttcaaaatgaggtgtcaatgattcaatggcggccacttcatgggccacaccgtggatgccaagcgtatcggctcggttagcggtgaggtcaagatcgataatgtaatcagtcatcccaagagcttcataaacttctgtcccaggttcaattgcttctgggaagacaaagatgccatcaacatattccttaggcacaacgctatcggcaaagccaatttcttgtaagccacaaatcatccccattgaaaccacgccgcgcatcttgccttttttaatcttaacgttgtcagcaatccgagaattaggtaatgcaacgactacatattggccagcagcgacattgggtgcaccacaaacaatttggaagggttcatcttcaccaacatccacttggcaaacattcaagtgatcagaatccggatggggttcacaacttaaaatatgtcccaccacaatttttttcaagcccgcgctcttttgcgcgacatcagccacttcaatccctgttcgggtaattttttcagccaatgcctctggggcagttgttaaatctaaataatcttttaaccagttgtaagaaactttcatggtctagccctcctgtgtgaattgatttaagaatcgaacgtcatttaagtagaagttccggatatcatccacaccatatttcaacattgcaaagcgatcaaccccgagcccaaaggcgaatccaccatagacatctgagtcgacaccgccggcttttaagacgttcggatgtgtcatcccagcccctaaaacttcaatccagccagtttgcttgcagacattacagcctttaccatcacaacggaaacaagaaatatccacttcaacagatggttccgtgaatggaaagtaacttggccggaaacgtaaatcacggtcttcaccaaaaatatggtgaatcgtgtattctaaggttccctttaagtctgccattgtaatgtttttatcaatcacttggccttccatttgatagaattgatgcgaatgcgttgcatcatctgtatcacggcggtaaacacggccgggactaatcatcttaatgggaccattagcaaagtcatggttttccaagtcacgtgcttcattgggtgacatgtgcgtgcgcatcaataaatcattagtaatatagaacgtatcttgcatatcacgggctggatgattagctggcatgtttaacatttcaaagttatgtttttcatcttccacttcatagccagcaacgacttgataacccattccaataaataaatcttctaaatcatcaatcacttgagttaagacatgcggggtcccttttttgaccggttggccaggtaatgtaacatctaatgtttcgtgagccagttgggctgctgccttcttggcttctaattctgccttccgggtttcgattgcttctgccaaatcactcttgatttcattagcaaatgcccccaccttaggtcgttcttcattacttaaatcacgcatgccgcgtaaaacttctgtaatcggtccttttttaccgagcacttccactcgaatttgatttaacgcctctaaatcaacaactctttgaatttcttgcagactcttttgctgtaagttttctaattgttccttcaatgacattgcaattcctccttatttttttcaacaaaaaaagcccgtccctcaaaaagggacgaagcttcgcggtaccaccctagtttacgaccattccagtcatacactcaagtttgcgctaacgggcaataccggaccaatggtcaactcagaaagtgaacttcacctaaacttagttgaataacttgcagtcaactgattattctccctgaaaactaatgattaggttactctttttcgtctttgtttaataattgtattttaacgtaaataaccgcaattagcaactaggcttctgtcgcataccagtcgtttgaccaatcgtgaatagcagccattactggcgctaattcttcacctttagtggtcaatcgatattcaatcaacgcagaatcatcactggtaatccgcgcaacaatgccttcttgttctagttccttcaatcgttcaaccaatacgcgatcactgcacttaggcacactgtgcactaagtttttaaaccgttgtgccccgttttctaataggacatcgataatcaggccgttccacttcttacctaaaattgaaaaagtcttttcaaatttaggacacagttggaaggcctcttgacagtcagcatttgcgttttcttttacaatcaccattattttcacctcacacttattaataagaagtgtactgaaaaaggctgcaaaaagcaacctatcagcttgaagcatctttacttgttaattgccggtgtttggcggagaactttttgtttaaatttcgtccacattggtgtacaaaattccgtcacagcacaataatcatcgactatcgatacaatgtaactttccttatatttcggacgactaacagttgcgccccacatgtgtttaacgatgatgtctttttctttaggtgagagttctgttaatttttcggcattccgaagcgcaatgcgcggatggatataagcatgtgtgcctaaatcgaacttcgtatcacgccagtcataatagaataaatcatgtaataagcccgcgcgtgcaattgctcgcgtatcaagatgccacttcttggcaagttcataactgcgataagagacgcttagcgaatgttccaaacgatctgaatgatgatgttgcgtatagttcgctaatttttggacttcatctttagctaataaatcggcaattagagccatgtaatccgcgtcatcgtaccattttgctgttgaattcattcaaagactcctgacattttttaaattcaaattctgccacaaggataacagcttttcgttcaaaaaagaagttaaacgccttaaaaagttacatttgttagaaaaaattaagaattaagcttcaatcaacttgaacattaaaatcccagctgcgactgccacgtttaatgattcagcattccctggaattgggatgtaaatattttgcgttgtggctgctaagacgttttcattcacgccgttcccttcattacctagaatcaaggccatgtcatttgctttaggcacatcttgataactgatggcctctggatttaattccgttccataaactgggacgtcttgcgaattgaatttcttcatccagtccatcaagttaccttgataaattggtaaatggaagtgactgccttgcattgaccgcaagagttttggattatacaagtcaacactgccattgcctaaaacaacgccggcaaagtctgctgcgtcggctgtccgaatcattgtgccgatattaccaggatcttgaacagcatctaataataagtaacgacccgttaatttttctggtaccggtgtttcagacatttcaacaacggcaaaaatgccttggggtgctttagtttcactcaagtgttgcgccacttctggtgcaatttcaaaagtttcatcgtaaagaccgcgcaatgcgcgttcgtccacatatttttcagtggcgaaaacttggcggatgacggccttattttggattgcttcttggactaaatgccagccctctagtagatacgtattttctttacgttggtttttcttaacggttaatttcttagccgccttaattttagtgttttgattcgattgaatgtattccatgttgtgctccagtctatttagtactttctattatacgcgacttagtgggtaaattctatcaagggtcgctttttaatcgccaaatcgggttgaacagcttacaatgaagaggaggtgatgacaatgcaaaatgcaattcaacttgaagtctatggccgcgtgcaaggcgtcggatttcgctggatgaccaaattggtcgccgataaactccatatcacaggtaccgttgccaatcgtgacgacggctccgttaaaattattgcgatgggcccagcagacgcactcgaaaaatttatcggtgctgtcaaagcttctcccacccctagtgggcgcgtcgaccgtgtcattcaaacaccgctcgaaaatgtgtcagcgtgtcataaattttcggttgtcagttgaaaaacctagccccttcaagtatagttacacttgttgaaacttatcttgaaagggctaaatttatgaaaaattctaaacgcttcgcgacactcgcgatgcttacaatgaccgttacattctttctcgctggctgtgttccacaaaaaatgagcagccatcccaaagtcccaaccggcttaatctatggttcatcctataaatacatcgccgtgccgctccaacatattatggaacgcattgctgatgttttcggtggcatcaatggttacggctgggcaattatcatcatcacattcgttgtgcggatgattttactcccattaatgttgaaccaatcgaataagatgacggcccaacaagaaaagacccgtcgcttgaaaccgcaattagatattatccaagaacaacaaaaagcggcaacaacccctgaagaaaaggctgaacttagccagttgatgatgaaggtttataaggaaaatgattcaagcatgatgccaagtcttggttgtttgaccttattaattcaattaccaatcttctctggtttgtatcaagccatccaatactcacctgaaatttcaagtagccacttctttgggatcggtcttgggagcccaaacattatcattactgtgattgcgaccctcttatatgtcggtcaaagtgcactttcattagtcgggatgcctgctgaacaaaagaaacaaatgcaaacaaccgtcctaatgagtcctgcgattacattcttcatttcgttatttgcaccagccggtttagcactttatttcttagccggtgggattatcatggtgattcaacaattaatcacgacattcatcatcatgcctcgtgttaaaaaacggatcgatcaagaaattaaggaaaaaccaatcgtcacggttgtcacaaaagaaatgttcactcaaaaagcagcagtcaaaccagctgccgacgtcacagaaacaccaacagaaacaagcaacccaactgtcgctacacctaaagtagctggcaaacgcaactcaggtaagcaacggcataagccacaagcttaaccaacaaaaaaaagcggtgcgcctcaatcaattagatgattgaagcgcaccgcttttttaatccgtattaactggttcttctgattttggttctacttcacgaatcagtggtaactcaactctaaaaacagaaccgtagccaacgctactttctagcgacacattcccgtcatagccttcaacgagttgttgggcaattgctaatcccaatccattgccacctttttcccgactccgtgctttgtcaacgcgatagaaccggtgaaagactttcttcttatcttcttccgaaataccttcaccaaagtcttgcacggccacttgcgcataccgctcatcactagcgacggcaatatgaacttctttacgtatcgttgaatatttaatcgcattatccaacagaataatcataatttgttctaagtgatttcgattaacatgcactagcgctggttggtgcaaatcattgtcgagcataaaattaaattctggatataacatctcgaagttatggtaattctgaagaacaacttccccgacatcggtcacttcagtcgttccttcagtcacgactttatctgcccgtgttaaatcaagcatttcttgaattaaatttttcatccgcaagatttcttgtaacgaagccgctaaagattcttccagtacctctggatcatctttcccccatcgattgagcagttgtagatgcccttcaataatcgcaactggtgtccgcaactcatgcgaaacatcactgacgaactggtcttgctgttcgaaataatgctgaattcgattcaacataccattaaacgcactgaccagatcagataattcatcttgactatgcccagtctcaggaattcggacatctgaattaggctctgaattaatggcttctatcgtttttttcataacttcgattggtcgcaagaattggttggctaataaatagccaatcaatgcactaaataacatagcaaaaaagacaaccacaactaacacaattcttaattcagtcatagcgtggttataatcacggacgttattgaccacctctacataaccaattacacggttttgacttgtcttaatcggactaatgccaatcagccgcatcttaccaaaaatagctttgcgctttaatgtatccgtatcgccttttggaaacggaccaatcgccccgcgcgatgcaaacaaacccttcttgtttgcatcataaatcttaactgtaacatcctgttgtgctaaccgcgttaaaaccgcatcttgatagatggctttaggactgtgacggttcggatccaattgattggtgacaaagccttctgtaagatgtggcccattgctggacaatctcgcttgtacgacggtcaccgtatcgtgcacattgtcgacttctctgtgtagcaagatattagagatactactaaagatcacaattgaaaaaatcgcaaaggtgataaaaatggccaacccaaccgcagctgcccatttgacctttaacgatattttacgacccttatttgttgttgatgctaccgtttcgtcctgcatcacgagcgcatcacataacccattccacgaaccgtttgaatgtaactttgttcgccagaacgatcaattttatttcgtaagtaacggatataaacatcgacaacattggtttcaacatccgaatcgtaaccccaaactttgctgagtaagacatcgcgtgccaaaacaacgttgacgttttccatcaatgttaataataattcatattcacgtttcgttagttcaatcacatcatcaccacgccgaacaactcggttttctttttcaaccgttaaatcacggtaagtaaccgtcgtttgtttagcagcgttatgttcgccttcgatatcaattcgccgtagcaatgcccgtaaacgcgctaataattcttcaatggcaaaaggcttaacgatataatcgtctgcgccatgatctaacccagaaacacggtcaatcactgaatcacgagccgtcatcataatgattggcgtattcttaacttggcggacccgacggcagacttctaacccgtttaattcaggtaacatcaagtctaataaaatcgcgtcccattcttcattcaaggcagcttctaaaccagtacgcccattgaaatggacctctgtctcataaccctcatgctttaattcaagttccacaaatcgagctaaatttttctcatcttcaataatcaatatgcgactcatttagtcactccccaaaaaagaatttttaatggactctctaaattctaatcaatgataagaattctctaagaaacatcaagcgccaaaatcggcttacctttccattctagcatagttccaattaaataactaactaatctgactctcatctgatggcgatttagtaataatcgaaaaaacacctgcgccttaataatcggctcgggtgtttagagaaacgtgcttcctcgaactgtcttttccggttaaccgtaaaatgatgcttatggctaagaaccgccataagcatcatttttctgttaatccttaaagccaaaaacgttcgactcatcactctattttaaaacgcgcatcccgtcgcagccatttccgcttaatctaaaattgccattaatcctaaaaccgggattaatggcaattttttattaatgctcaatgactaaatgcaatagtcagcactcttgtactaaaacgtgctccagtagacatccgcttccggttagttgcataccgcaaacgatcggtttcaccgctcatttacgatattccactaatcctcagcgcatccccgtctacttgcgcactctattgttctttataccaagtataatggaatgtgccttcgcggtctgttctttggtatgtgtgcgcaccaaagtagtcgcgttgtgcttggattaagtttgctggtaatacttctgaacgatatgaatcaaaatatgtgatagcagctgagaaaccaggtgctggcacaccttgttggatggccattgcagctacgtcacgaacagcgccttgataattctttgtaatatctaagaagtaatcatccaacaataagttgtttaaatcagcttttttatcaaaggcatccgtaatcttttgtaagaaacgggcccgaatgatacagccttcacgccagatcttagcgatttcgccatagtttaatgaccagtcatattgatctgaagcaacccgcatttgttcaaagccttgcgcatagctcatgatcttgctgaagtacaatgcttggcgaatcttttcgattaattcttttttatcttctgttaatttagcaacggttggggctggtaaaatcttgcttgcagccacccgttcgtctttcattgctgaaatataacgtgcataaacagattctgtaatcaatgattgtggcacacccaattcaagggcgctttgtgaactccacttaccagttcctttgttaccagcagaatctaagatgacgtcgacaattggtttatccgtttctaaatcatcttttcgcgttaagatgtccgctgtgatttccattaaataactgtctaattcgccgtggttccattctttgaagacatcagcgatttcttcaacagataaaccaacaacgtttctcaataaattataactttctgagatgagttccatatcaccatattcgatcccgttgtggaccatcttaacatagtgaccagcaccgtttggcccgatgtatgtgacacatggttggccatcttcagcctttgctgacatttgttctaagattggtgcaactaattcataagcttctttttgaccgcctggcatcattgaagggccttctaatgcgcctaattcaccaccagaaacacccattccgataaagttaatgcctgacttatctagttcagcattccgacgaattgtatcgccaaagaaggtgttcccgccatcgattaaaatatcacctttatctaataaaggtaacaattcgttgatgacagcatctgtaccagcgccggctttaaccattaagatgattcgccgtggtttttctaatgattgaacaaattcttcaattgtatagcttggtaccaatttcttttcgctgtgatcttgcatcactgcttctgtcttagcacctgttcggttataaatcgcaacggtgtaaccgcgactttcaatgtttaatgctaagttcttgcccataactgccatcccgatgacaccgatttgtggttgactcatgtaaaaggcctcctaaatgatttctaaatttaagcgttgttgactatcaaaacgacaacgcgtctactgtgtttatgttagcagaattacgctttaaataaaagcattttaactgatttggtccggtccatttaacaaattgggtataaaaaaacgccaaacttagtcggcgtcattgttttgttcttctaataattgtttaagcttagcaaattcaggattgggtgccgtttcttcttcagcctgttgcttagcataggcttcttcagaaatgactgaccacgactgtccggctggcatcacatcatcttgttcttcttctggtgttaggatgtgacttggaatgtgcaagagaatgtgatcttcaacagctacctgtagctctagggcttcgccttcgattgggaacaaaatatcttcgtccgtaaatcgtcccaactgctcgtcttctggatcaacgtagatttcagtgaattcaaaatccattggcaaggctactggatctaaactccgcgttgatggcactgttaatgtcccgaccacatgtacgcgtgcaattacagcgcgctggtcaaccgttaatccaccgtctactacaaatggtgtagcatctaggacatcagcttctcttttttgtaaactttcttttaacatcaatgtttctttaaacatcaatggatgatcacgatgttttaataatgattggactgtccattttaacaatgctcgtcatcctttctttggttaaaaatcggttggcgggcaaaattctgtgattgccagccaaactgttcttgtaatcgatcaactcgcacctctaaccccagtgggccctcttcggtacccaatttagctgagaccttactgataagtggttgatcgagcgtttttttcaacgtgtgcaaatgcgcctggccgacttggttaaagccaagcaaatggatgggccgctgcgctaatgattgttcaatatccgtttgttgaatattcaacaggacgtataaacaaacccgttgcaagcgtgcatacgtatatcgctttgttttaagtgcctgtaacaactcggcataccgattgactgaatgaatcacctttttgaaacggtactccaagccctctgacatctgataaatctgccgaagttgggcaaggggtgtactttcaattcggtatttcaatagcggccatagttggtcccaatccagatgcgattgagtctggagcgctgttaaagtcgaatgcggcatcactggggctaactgtgcccagtcatcaccctttgttgccgcctgtcggatagcactggcactagcaaattgtcccgcgccaatcgtttgatcgccgtgttgtgcctgctcacgcttaatcgcaagcaactgcattggcacttcaagttgcgcgttggcaaccgcataactgacccctaagaggtgattgggttgatctaaatttaaatttaattctgcttgataaaactcattgagctgcgtcgcataagttttttgataatcaataaacgtctgtgacttggcctttaaagctaaaatctgttgcccgacttgctgatagtcaaacgttggatattcactgccaaacgctaaggtctgacaaccaagcgccgccaataacttgacggccccatcagcaaaacggtctgcaggttggacagcactggcaaacggcaattcaacgaccatatcagcaccattgctcaaagcaagttgtgcgcgcgtccatttgtccaaaatcgcgggttcacctctttgcacatagttaccgctcatgcagacaatcactaaatctgcgtgcgaagctacccgcgcctgttgcaattgataccgatgtccattatgtagcggattatattccgcaataatccccgtaattctcatgcgtcctccgcctatttcactgcgctaaagaaccaacgcacactatcttcttgaacggcttcttggccaaaatcagcactgactgatacattcttgaacccagcagcttctaatgctgcaacataatctaccaccggataagttcgttcatggtgtaattcattaagttcttgataaccgtcaatctcgtcatcccagataaaaaagctgagatcatgttcaactgaatgtggtacttcacctgcgtaactcgtccacatgaaggccgtttctgccgtcttatcgttatacataaaacctgggaaaagctcatccatttgataaagtgaatgggcatcaaatagaaattgaccacctggctctaaatttcgataaacttgttcaaaaacttgttggacatgcgctaaatctggcatgtaacagatcgagtcgtcaaaacaagtgaccgcttcaaacgtcccaatttcgcctaagtcaagcatgtcgccttgtaataaaggtaactcgacctcggcttcagaagccttttcagaagcgatactcaacatctcggccgataaatctaagccgacaacctctagccctgcttgttttagcaagatggctaaatcaccagccccacaagctagttctaggactcgatgtttattttgtaacgtctgcaacgtgtaatcccgccattgaccatataatgaatggtccatcaaacggtcatagacggttgcaaagctttggtaaatcattcttcatccaaccattcggaaacatcaacaagtggtgcttgatcccaaagtttttcaaggttgtataaggcacgttcttctggcatgaaggcattgacaacgatatcgccaaagtccatcaagatccaacgtgaaccctttttaccttcgatgtgttttacgaaaacgccattttcttcttctgcgtcttcaatggcgtcaataattgcgcctaattgacgttctgacgtcccagttaacatcacgaagtaatcagctaataaactgatgccttccatgttcattgcgacgatgtcttctgctcgtttgctatcagctgcttgcacagcaatttttaaaatatctaaacttttcactaaagttctcctttatttggcttgagtcggtacccaagcattgtatgtgtcgattgttttcggataaatctgcttcttgccctgaattaaaaaggtcaatgtatttaagatttcataccgcacgccggctgctaaatcagccattgctgtctcacgagcagcttctgcgcccggaaaattgcgcccaggttcgacaaaatccgccacaaataaaatctgatcaatcaaggtcatttctggcgcaccaatcgtatgacgacgcacagcatttaaaatcgtttcatcatggatttctaaatcacgttcaatgaaataagcaccaacaacaccgtgccagatggcattaccgtaattgagtagttctggatcaaagccttgcgttttaatcgcttcaatgaacgtttcatctggtaattgcttagcatagtcatgcactaaaccagcaattgccgcgcgttcaacatctgcgccatttttttgtgctaattgaatcgcggtggcttccacacgcaaacaatgttcaaatcggctttcagataagttagcggcaactttagccactaactcagcccgtgtatacggcacgatgttttcttgataaacaaaatcactcatgatagaggccctctttttgaatgtattcaaagactgggtccggtaacaagtaccgcactgaacagccttgttgaatcttattgcgaatttgcgttgaactgacatcaattaccggtgcgtccacccataagactggatacggcgtttgttgagcataccctgttcgtttaacaccaacaaattggactaactgcactaaatcatcaattcgataccaagtaggcaagtagtcgaccatatcaccgccaatgatgaaataataatcgatttcagggtgttgttgttttaatgccacgatcgtatcgtaggtgtaactgacaccgccacgttcaatctccgttaaatcgagttcaaaatgcgaattgtcagcgatggcacgttctaccattgcaacacggtgttttgctggtaatgtttttttctcatcaacgtgcggtggattggcatctggcataaacaaaattttatcgagaccgagttggctacgaacttgttctgccatcactaaatgaccgatgtgtggcgggttaaatgtgccccccataatgccgacttgcaagcgatggccatcttctacaaccaacacgtccggttcagtcacatgatttgtctgctttagcgttgcactttgcatctgatcaccgccttattagcgtccgagcttagtaacaatcgttgaaatcttttggtatttttctttccgtgaagctttataaatcaccaatgtgcgtccaattttttgcgcaatttcgatgcgactgtcatgttgttttaagaagttggctaattcatcaacggtcacttctgttgtttgtaacaagttaatcttaacgagttctcgtttttcgatggcctcttcaatttgttcgaaataagtttggcttaagccgtttttgcctagttgaaaaagtggtttagtggtttgcgctaaaccgcgtaagtaatgtttttgtttgcctgttaacacgtgcgatacttccttccctaattaaattaatgctttccgaatcatgactgagacacctttaggcgcatatcccgcaaccacgacattttctggtaacgtaatccagcctaacccagcaaacactaaatcactcttttgctttgttgagaattcataccgttggagttctggaaaatcagctaaatcttctggatgtggtggctgtagcatgtcccctaattgcttagcgtagaattgatctgcattttcaagtttagtccggtgaatgtaaagttcattgtcaaaataaccgacaaagccatgccgtgcaccttgaatgaaatcaaaacgagctaacccacccaagaacaatgtttgttgttcatttaattggtatacttttggtttaatccgcttttgcggcgcaatcaaccgtaagtctttatcatgtaaataatgcgccatttgttgggcatgcataatccctggtgtatcaatcaatgcatgatcatcttcatacaatggaatatcgatgcgatctaaagtcgttcctgggaattgtgacgtcgtaatcacgtcgctatctaaaatcccagtttgcttgataatgcggttaatcaacgttgatttaccaacgttcgtcaccccaacaacatagacatcgcggcctttacgttcgcgttcaatcacggccaataattcatcaactgaattcccttttttagcactgaccaacatcgtttcaaccggatgtaagccatgttctttcgcttctttttgaatccaattgatcactttatttgggttaagagcagatggtaagatatcaaccttattccccactaaaatcacggggttatcgccgataaaacgatgtaaccctggaattaaactcccgttaaaatcgaagatatcgacgacgttcacgatcaacgcgtcactgtcgccaatttggttcaataaggctaagaaatcatcatcatttaatttgatatcactgatttcgttgtagtgtcgtaatctaaaacaacgttggcaatacaattgacccgtttccaagccttttttaagcgctgaattaggcgtatagccgagtgcttctttgtccgttgtttggatgcgagcgccacagccaatacaaaatagttcttcctcagtttgttgtgtttcagtcatttaaatcctcccgccaagttaaatctgcgtgtttttttagtagttgttgcataatatatttttcaaagaatcgattaatcgatgtattccaggcatcactgtcaataatgggtttgaccaatatcgtccggacgccagccacattaccggcatgcatatcggtaatcaattgatcgccgaccatcaccacttcatgtcgcgaaaggccaagctgcttcttcgctttggtaatcccagttgccaatggcttgttcgcccgagcaatgaatggtaattgcaattcactgagcgcgcgttgcacgcgatcatggttgttatttgaaacaaccatcacggtgatttcggcagcttgcatctgtgctaaccaagcttttaactgtggtgtgccatcggggttattccacgcaattaacgtattatctaaatccgttaaaacggccttaatcccttttgccttaagttgttctggtgttaagtcgtagatggcattgaccatccaagttggcttgaaattctttagcatgtactgtcccctcgactttaatgtgctttcatcaacagcttcttgcgctttgctacacttatcaaatcggcgcttgcagcgccaattcgctaagttaggcaaatgctcggaagctaaccgtggatgacgcacttcttttctttaacgtgcttttcaaaccatattcctgtgcctagcgacacaagtcaaacgattacttgcagcaatcattcgccttgttaggctagtgctcggagtataccaggtttgaacgcacttcttttctaacgtgcctcagtaggcatatttttgcggctagcgacgtccgtcaaacgaccaacaagttggtcattcgccagactaggctagtcctcgaaatataaccgcctactgacgcacttctttttaatctagtcactgattaattatagggtatttgacaccaaattgcacctttacgcggttaatttccataatttccaactaattcctaatccatttaaatccataagtcaaactaatcgacttttagccccaactctggtacgtttaaagaaattgagaggatgtgtttgttatggaaaaattcggttttaatcactttggcggccctgacgttttcgaacgtttcgatcagcctcaaccaactccaaaggacaaccaagtcctcattaaagtgctcgctgctggattgaatccatacgatgttgcactacggaatggttcacaagattcagtgcgcccattacccttcccaatctttcctggtacagatgtggttggtgaaatcgttgaacttggtgctgacgtcgatgattaccgcgttggcgaaatcgtcatcaatcaccgatcaatgggtgcttatagcgaatacgtaacggctagtactgcgaagattctccgtaagccagccagcatgagtatcgctgaagcagccggtttacccagtgccggcatcactgcttacaatacgctgatgcacttcacaaactttaaacacggcgatacaatcgctattatgggtgccagtggtgccgttggtagtttactcgttcaattaagcttagcagctcatttaaacgtgattgcaattgccaatagtgctaacctagactatctgcgctcattcggtgtccaagaagtaattgcttatgatcagccatctgacttcgaacgacttgcgcagaccgctaaaatcggtatcaacttaagtcgcgatccagaatcaactgaacgcctcaataacttagttgcaccaggtggcacattcacttcaacgaccatcttaccaacagacgatcaacaacgcgctgacatcaattaccaatctgtctatccgcgtaaggattatgcagatttaaccgccttacaagatttaaatgaattgatcgatcaaggtttactacacaataccgtcttcaagacgctcccatttactttggaaggcattattgaaggtcacaagctccttgagagtcatcatgccccaggtaagattgttattagccactaattttataatgataaaagaaagagtctagaacaaaacgaagttttgtcccagactctttttttgatctttaattatttgtttaatgcagctttagcagcttcaacaactgatgtaaatgcagcagcatcgttaacagctaagtcagctaacatcttacggttcatgtcgatttcagcgactcttaaaccgtgcattaattggctgtatgagatgttgttcatacgagcagcagcattgatacgagcaatccataacttacggaagtcacgtttacgttgacgacgatcacggaatgcataacggtatgaaaccattacttgagtatttgctgatttgaataataaatgtttagcgccgcgataacccttggctaattttaaaatctttttacgacgtttgcgcgtcactgttccacctttaacacgtggcataagaatttcctccttgaataacaaacaacgtcaaagcgttgctgtactgatctaatttttgcttgaatccgaaaatgctatggcttatttaaggcctgataacatttgacggatacgtctcatatcgctatttgaaaccattccagattttcttaattgacgacgttgtttcttagtcttgccgtggaaacggtgacttgtgtaggcgtggctgcgttttaggccgccattacctgtacgtttaaaacgttttgctgaagcacggtgtgtcttaaattttggcatgatatttcctcctaataaatcagaaacagattttttatttttggtcctttagcggttctaacattaagaacatgctacggccatccattttaggacgtgctgtaactttagcgatgtcctctgtttctttagcaagtctttccaatacacgttgcccaatttctttatgcgtaattgcgcgccccttgaaacgaatagaagctttcactttatcgcctttgccaaggaacttacgtgcattgttcaacttagtattaaaatcattttgttcaattgtgggactaagacgaacctctttgaggttaatggttttctgcttcttacgagcgtcacgttgtttcttttgaagctcgaaacggtacttaccatagtccataatacgagcaacgggtggttttgcgtttggtgaaaccaaaacaacatccatattagcttgatcagctaatgcaattgcatcttgagtactcttaataccaagttgttcgccatcttgagcaatcaaacgcaattctcgtgcacgaataccatcgttaaccatcaaatcttttgctatgactcttcacctccataaagtttagagagaaaatgcagctaagtaataaaaaaagcggccctctcataacagaaaggcccgcttgttcggttacttagttcgtccgaattagaaactatcagcccagagacatcaagtgtctactaaggcgagaagcgggaacttctgctttatttctcaacgaaaataagtatactcggttaggaatttaaagtcaaggaaatcccgcatttaaatttacgtgtacttagttgccgtaatgattgtccactaagtgcgtggcttttacttcgtcaatgttgtgtgtaccagctaattgcatgactaattctaattctttttgcaagtagttaaagacactttgtaccccttgtgcaccgccaagtgctaatccgtaaatgactgggcgcccgattgcaacgatgtctgccccttcagccaatgctttaaagacgtgttgaccacgacgcacaccactatcaaagacgattggtacccgtttattaactgccttagcaacgacgtgtaatgaatcaaaggctgcagggccaccgtctaattgacgaccaccgtggttggatacccaaatccctttagcaccggcttgaagtgcaatttcaacgtcttctgctgtttgaatccctttaacaaagactggtaaatgtgtgtattcagaaatgaattcaacatctttagggttcaaacgttgtttagctgatttgtagacggcatccattgtttggcccacacctgtttggtaagcttcaacgattggtaacccgactgggaatgtaaaatgattgcgtttatcggtttcgcggttaccaccaactgtggcatcagctgttaagacaatcgctttaacgttatgcgccatcgcttcatctaaaatcttacgattgatatcgttatccttactcatatagagttggaaccattgcggtgcgccatctgctgcggttgccatatcatcgatacttgctgacgcaaatgaactcatggttaagattgaaccgtaatcagccacacctttagcggttgccgcttcccctttagtattcactaacttatgagctgcaacaggtgccataatgattggtgatgttaagtgatcgccaaagatttcggtagttgtatctggattttcgatatcttgtaaaacccgtggtgcgatgtatttgtgattaaatgccgtaatattttcgttaatggtataaagatcacccgcgccactgtaaatatacccaaagccacccttgggaacaacttcgccggcttctttttccaagtcatagaggttaataatgtccaatggttgctctgctgaacctgcttgatatttttctgtcgtcataataacgcctcccattaatcaacgattggaaccgtttacatatttattataccgcttttttagttgtgcgcaattaaaaaaacaaaaaaacgtccgaaatgtcaaaataacatttcggacgttttaataaccgcttataggttgattgttttgtgatctttaccatcgcgactgtagttaccaacttcagcaacgattgcatctacaaacatgtctgaagcttcttcagcagcgttttcttcaccgtatttacggacagaaaccgttgcgtcagcaacttcttgatccccaacaactaatgtataaggaatcttgcttgtttgggcttcacgaatcttataacccatcttttcattacgatcatcaatgcgcacacgtaaaccatgtttgatcatcgcatctttgacgttctttgcataatcataatgtaattcattcttaacgggaataatcacagcttgagttggtgctaaccatgttgggaaagcgcccttgtagatttctgttaagtaagctgtgaaacgttccatcgttgatactaaaccacggtgaatcataactggacggtgcatttcgccatcttcgccaacatattgtaattcaaaccgttctggcaacatgaagtctaattggattgttgaaagtgtttcttcattgcccatagctgtcttcgtttgaacatccaacttaggaccgtagaaagcagcttcgccttcagcttcaacgtaatctaaaccaagatcatccatagcaccttttaacatcgtttgtgctttgttccacatttcatcatcagcatagtacttttcggtattagcaggatcgcggtagctcaaacggaatgtataatcgttgatattgaagtctgagtacacttcaatcattaatttcaaaattgacttgaattcatcttgaatttggtcaggacgaacgaatgtatgtccatcatttaaagtcatttcacgcacccgttgtaaccctgaaagcgcacctgatttttcatagcggtgcatcatccctagttcagctaaccgaattggtaattcacgatatgaacgtgggtggtgtttgtaaacttggatatgtgatgggcagttcattgggcgtaattcaagcatttcgccatcgcccatatccattggtgggaacatgtcctcacggtagtgatcccagtgacctgattgtttgtacaaatctaagttcgctagaattggtgtgtaaacatgttcataaccattggcaacttctttatcaatgatgtaccgttcgattgaacgtcggatggtagcaccatttggcaaccaataaggcaagcccgcaccaaccttaggatcaacaaagaataagtctaattggttcccaatcacacggtgatcacgttctttagcttcttgacgacgctgtaagtcagcatctaagtcagcttgtttgttgtaagctgttccgtaaatccgttgtaacatcttattacttgatttaccttgccaataagcgccggcaaccgataagagttcaaagaccttaacgtcgctcactttagctagcattggtgctaacccaaaatcagcaaaatcgcctaatttgtaaactaagacttggtctgtttccatttcatctaataatgctaatttgtaagtttgcccagcaaatagtgttttagcagcagctttgtctaagctgacacgttcgattgccccgccagcttggattaacttgctcattgcttttttaatgtctggtaagtcggtcacagctacttgaccagcttcgttttcggtatcatagaagaagccatcttcagttgcatgtacttcgccgaattgcatctcgggataagcacggttcaacgttgcagctaaaacaaaggctgccgtattccaaattgccatcaaatcggttgctttgtcgtctttagtgatgatttcaattgccccatcttctaaaattggttgctgtaaatcaactaattcaccgttcaatttaccggcaattgcctttttagctaagcttgtactaattgatttagcaacatctaaaagacttgttgcttgttcaaatgccttttgggcaccatctggaaaagttaattgaatctctgccattactattcactccttctaatttgtcatcaacaataaaaaaagtccctgagacgcacgaattgtgcagctcagggacgaattaatttcgcggttccacccagattgagaccccaacatttggttctccaactttaagcgtctataacggaaacgacccgatcagttgtattgcctttgaaagtggtcaattaaatgggggtgaaaaactttcagctatgtttttctctctgcgatggttcatttaaaaggtgtctttcatcattgattgattctattaaaacacttaattgcttttttagcaagcctaaattactaaggttgtaagcggcgattttgaccaccaacttcaatttcttgcgctaaatagcgcacacgttgcatgatgcgggccgctttaaccggttcgtctccttggttgctagttgtcaaatgcgtctctaattcagtcattgtgaagtttgaactgaagaaggtggcgagttgttcttgcattcgatattgcaaaataatgccaagtacttcatcccgaacccacgcactcattgcatcagcaccgatatcatcaatcatcagaatcggtgctttttttatcacgttaaccttttctaacacattgttttgcccaattgcattcttcatctccactgaaaatgtcgggaaatgaatcaacgtggtttcaaacccggataacgccagttcgttggcaatcgcacctaacaagtaagtcttgccaaccccgaattgcccgctaaggtacaaggcttggtgaaaatcatggggtgcttgccgataagccccgataaacgcggtagctttgatcaatgcgtcaaaccgattggttggatcgtatgaatcaatcttggcctgttcaatatcgcgcggcatattaattgacttcactcgtgcatgcaaggcagcttgttcgcgctcttgtaataaacttgccgtaggctcataactgacatcgataaaatggttatttaagactaactttggcgcataacccggtgccaaagtggtttgcccattagctaacttcttcttttcgatgacgtattcgtaaattttagcggcactacgcgtgaccgtttcttgtgataagcggtctttgttagcttgtataaatgcttggacatcggaatcgttcaaggcatcttcgaccaatttattaaactgttggtttaacttttgccgattcatgtaatccgtcaaatctttacccatattttccattacgattcccgcccctcacgaatttttttcaacgccacttctagttcatgctgatgctcaggtgtggttgtttcttttggcgcttgataatctggtttagcccatttaggtactggttcttttttagttttgttctgataacgcgtttggcgattgttttgcacctttgccgtctgtttggtttggaaatcgcgaatctgcaaaatcgcatccgctgccgtcttaaccccttgttgagcccactggttcgcaatccgatcgactagcgcctgagtgagcccatcatattgcgtaatgatataaacgaccaaaatattgagcacatcattgttaaagatatagcggttttgcaagtcctttaacgcccggatttcatttttagcgacaaagccgtggttcttttgtttcaagtattcgagataatcaactggcaagtagccctgactttctgttagccactgcaattcctgttcgttaaagccggctttttgccattctttttgtaactcggctaacggtttttgcgttgttgtagcagctggcgtttgccggttactctgacgtcgtgtgtaattgttcaagacgttctgttcgagcgctgccatattaatcgtactgtcagcaacattcatcgtcaagccaatcaaacgcgctaagtccatctcatctagaccatagaaataatggagattaaacaagccctgttcatttttgagaatttgatccgtatcaatctggtattgcgccgttacatcttgtaataggtcccaatcaaaagtccgcaactcaaccgaggtaaactgcggtgtgctagctgctttttgttgatacattgccttagtttcagccacactgcttggcgcggtcgtcaataaatcgttttgcacatggaaaacggtcaagaaattcttagtgacctcttgataatccttggcgtaaaccggtcgtagcttgaaatagtcacggagttccacaaaccgtgtttcgcggaccgcttcgaacaatgccacacttaacaaatcatcgttaaaaaaagcttgtggttgcaatggcgcatacagttcatacaccaacttgcggccagttccctcatttttttgatacgtccgcattaaaccaagtgcttccaatttgctgcggctgtcataaaaagcaggtaaatcaacactcaacagatttaacaaagtcgcatgtgtttgaaaatgttgttccgtttctttcttggtttgactccataacaaaagatagagactgtaagcaacagcccccatcaatggttgatataagtaagtgacgactgtttgatcgaaatcggtcaaatagttagcttttgtcactgaaaagccgtcttttggactcaaaaaatcaaatgcatctgacatcggctaacccctcttccttaattcgatttcttcgtcttttctttattcatcatttcttgtaattcactcataaagacattcatatccttgaattcgcgataaacactggcaaagcgaatgtaggcaatctgatcaatatctggtaacaagcgcatcacgtattctccgacggcttgtgaagagacttcgttttcacccaatgagcgaatcttattctcaacttcatcaactacttcagtcatttgctccattgtaacggggcgtttttcagcagcacgaattagcccgcgcaataatttatcacggttgaattcttcgcgcgttccgtttttcttgattaccaacaatggggtttgttccactcgttcgaacgttgtaaaccggaaacgacaattctcacactcacggcgacgacgaatcactcgcccttcatccgtgggacgactatcaattacccgcgaactattctgatgacaatgtggacatagcataatgacaccttcttatcttttgattaattcgtttcaaattcaatccaattttaaaacaattagtataacagtagtataacatgccaggcaagcaggctaaacaaaaaatgtatcagtctcaaggcatttcgccttttccaaacaaaaaagcggtcgaacagaataatctgttcgaccgcttgtattacttgttatgacacaactgttgtaacaacgccaaaacacgttgccgcaacattgcaggtgtgccttgattatcaatcacgaaatccgctcgcgcttttttggtcgccaaatcactttgactatcaattcgcgcatttgcctgttctatagtcaattggttacgcgccatcaaacgttgcaattgtgttttacgttcaacgtagacaactgcaacaccatcgcaatattgctcgtagtgttgttcatataacagtggcacatccaacacaaccagcggtgcatctgctgcttgcatctgttgtttaatggctgtcaaaatagcgggcccagtaatcgcatttaactgagtcaaagcctctgggttaccgaagacttgctggcccaacataggccgatcaacttgaccatttttgacaactgcttcgccaaaggctgcttgcaattgtgtctgtaccgatttattagtcgctaatacctgatgagcaacttgatcagcatcaatcaccgggattccctgttctttaaacaatgccgcaacagtcgacttcccactggcaatgccacccgttaaacctagaaaatacgtcattgaaccgcttctctcttaatctgacaccgcggacagaaatgcgtgccacgctgtgctactttaattttctcaatcggagtctggcaccgatcacacggttgccctttcttaccatagacgtgcaacatatcctgaaaggccccagcgtgacccgccgcgtttaagaacgtattgactgttgtcccaccgttattggttgccagttctaactctgtgatgatttcatcatgcaaacgatctgtttcagctttcgtcaataaattcgccggtgtttctgggtgaatctggctcaaccacaacgtttcgtccacatagatattcccaaggcccgttacaattttttgatccagcaacagtggtttaatcgcttttttatgtttctgtaacgcctgatagaaggcggttttcttaaacgttgttggggttggttcaacccctaagtccttcaatccagaaacagtgttttcttgacccgtttcaattaataacattcggccaaacttacgtgaatcaagataacgtaactgttgtccatctgtaaatgtccaaatcacatgcgtgtgcttagtcattggtacggattgatcatcaacttcgtatttgccttccatccgcaaatgactcacaacagttaagttttgatcgaaacgaatcaataaatacttaccgcgtcgatcaacaccgataatttggcgtccaacaagaccttcaacaaaaacatcgtctggattactgataattttcgaccagcgaatctcaattgcttgaaccgtcttaccgaccactaattgttccaatccgcggcgcacattttcaacttctggtaattctggcattgtgtgtccccttatttcttaatatcgtaccaagttggtccaaagccactttcaactttcagaggcaccgctaatgaaaccgcagaatccatgacatttggtactaatttttctaacattggtatttctgattctggtgcttcaaaaatcaattcatcatgtacttgtaaaagcatcttggcttgtaatcctgccttcttcagttccgcttgcatcaagatcattgccatcttaataatatcagcggcactcccttgaattggggtattcattgccgtgcgttctgcaaatgagcgcaaattgaagtttttagcgtgaatatctggtaaatagcgacgccgatggaagagcgtttcaacgtagccttcttcgcgcgccttcttcacgatatcttgcatgaattgatgaacacctggatactgttcaaaatacgcttcaataaagcgtttagcttcagcccttgtgatcccaatattttgtgataagccatagtcactaatcccgtaaacaatcccgaaattagttgctttcgcttggcgccgcatatctggtgtcacttcatcagcgctcgataagccaaaaatcttcatcgcagtattcgcatggatatcgcggtcttccttgaatgcctcttgcatattggcatcccccgaaatgtgggctaaaactcgtaattcaatttgggagtaatcagaagcaaacatctgccaacccggttgacttggaacaaacgcttggcgaatcttacggccttccgctagacggactggaatattttgtaagttgggatcaaccgatgacaagcgaccagtctgcgttaaggtttgcaagtaacgcgtatgcaccttattatcttgatgaattgacttcaataatccttcgacatacgttgactgaatcttagcgatttggcgataatccaagatggtttggacaattggtgcgtcttttttaagttgttccaagacatccaccgccgttgaatagccggtcttggtcttcttaatcactggtaaccccatcttttcgaatagaatgacgcccagttgcttaggcgaattgatgttaaacgtttcgccagcttccgcataaatcttttcttccaaaatcttcagcgtttgactgaactcgccccccatttgttgtaggcgacttgcatcaactcgaatcccggtgatttccatatccgctaaaactagcgctaatggcaattccatatccgtgaataaatcgaattgttgatgtttttttaattgttctgtcaattgtggtgctaatttgtaaatagctgctgctttttgaatcagatgttgataaagcacggttggatcgacaggggctgcgcgtttagcccccttgccataaacagcttcatctgtttggacattttgatactgatgtaaatttgcaaccgttccaagatcattactgttattcgttgtattcaacaaataagacgctaatagtaagtcaaattgaacccccgctaagtgaatccctaagcgattcaccgcaacctgattgcgtttcacgtcaaaaactgctttcggacgtttagcatcttctaaccacgtttttaaaaccgattctgtcaagagtgttgcgtcgtcgctgacataccagtggtctggtcggccaatgtaaaagccaatcaagtctgctgtatggtaattgtcggttaacatttcgatgccaaacgcaacgttttcagtggttgtcacgacatcggcgatgttatcaagggttaatactgtaaattgatagtcttcagtagccgtgggttcaactggtgcaacatctaattgatttagaaacgacttgaagttcatttcttggtaaaaagcaaccaaagctgccatatcaggtccgttgtacaccacatcgtctaagccaatcgtaattggcgcgtcacgtttaatggttgccagtgtcttactcgtgaaagctaggtcgcgatcttcaatcaaatgttctttcaatttactctttttcatttcatcgacatgttcatagacaccttcaatgtttccaaattccgtaatcaatttaagcgcagtcttttccccgacctttgtcaccccgggataattatcagaggtatcgcccatcaatccttttaaatcgataatttggcttggttctaaaccgagtttttcttgaacgtgttcaggggtatacgcttcaatttcattgacccctttaacagtgatgttaacggttgtctgactagtcgtcaattgagttaaatcgcgatcaccagtgacgatatcgaccgtgaaaccatcagcttctgcttgtttagcaagtgtaccaatgatatcgtccgcttcgaaattagcgagttcataagactgaataccatatgctgttaagagttctctaatataaggaaattgttccgttaattcaggtggcgtttttgaacggccccctttgtagtcggcaaattgttcggttctaaaagtggttttgcccgcatcaaaagcaactaacacgtgtgttggttcaatctttttcagaataatatccaacatattcttgaaagcataaatcgcattagtgtgcagtcctgcctgattggtgaaatggtctaaagcttggtgcattgcaaaaaaagcacgaaatgcaacactattgccgtcgactaataataattttttttgagaacccatgttgttcctcctacattcgtaaagtgactagctctattctaacaaagaaagtgacgcgcgtcattatgcgcgaccgttgctaatcgcgacgaattgtcaacttaagtgcaactttttacccatgaagacttctgatggcgtcttccagcctaagaccttgcgtggtcgattattcagttgttcaatgtaagtctcaatttcctggtcgctctgaaggtctaggtctgtgttcttgggaaagtattctctaatcagtccgttggtgttttcgttagttcctcgttgttgaggcgcgtgtgggtcaggaaagaagacctttgtattcagacgttctgccagctccctgtaccgggcaaactcccttccacggtcaggagtcactgttcttactcggttagctggtaaggcaccaagcagctcaatcatgacgtctctaacagtgtcagcttttgcgttggccgttcgcttcgaaagcagatagcgtgatttacggtcaactaatgttactaatgcagagtgtcctgttttaccgcgtactgtatcgccttcccagtgaccaaaccagctgcgattttctgccgaccggggtcggtcgtgaattgatggcacgtcattgaagcgcccccggcgttcatttatggtgcctttgattttgcgcgtcttgcctcggtgtcgaagcagccttggtagcccgcgagcaccatggctcttcaatggaacgccgagattatctaggtagatacctctgtagatagtcgaatagctgatgcgaataggactgccttctagtgacaagcgaccggcaatctgctcaggcgaccaatgtagcaccgtgatatatcgaatgacagcgtcacgagtccccggtcgatcgaggatccgaggacgcctgctagccaagcgaacccgccggtagcggtcctgagcggtggctgccgaatagctccgccagccgccgttacgtgcaatttcacggctgactgtactcttggaacgacctatctctttggcgatggtatcaagagttttgcctgtagagataccaagcagtatcgattcacggtcttttaaggtaagatgggtgtacggactcatagtcgagttctccttgtagttggtcttgtggtgattccattttacaaggactcaggctatgagtcttttctatttgactaatttgttgcacttgaattgtaaatccgtcgcacaaaaaaaggccgcaacaaatggttgtggccttttttaacgtttattttgcttctgggcgatccatgttcattgatgccatgcgaccaaagatttttttgctttggtcgattgttgcgccaacagtatcttggccgatttcattttgtaaatctttgtacaagtctacgtaatagaacaagagatgacgataaacttccaaacccttttccgtcaaatgaacacgacgaatgcgttggtcattttcatcagattgttctgcgataaaagccatcttacgtaatgaacgacattgacgtgaaatcgctgaacgactcacttgcatcttatctgccaatgcactgttagttgtttcattattcgcattttgaatctcgtgcatcactaaaaattggtcgaaagataaaccgtatttttggctttcacgactcattgattcgctaaggttgttaatcaaccaccggtataaacctgcgaattccataaaatctgctgatgtgctaccgagtaaatcggtgttattactcgtatccatttctattcctcctacatgctgaaactttcagtatcaatagttaaccatcgataagtttcatactcacactattcagtacttcaattcttccgtgttctaagatagccgatctaaataatacttagtcagctaatcttaaccgtacttcgatttaaagcaatataaatagtctatagtattaaattatatatttcaactaactttcactaataatcatcaacaacgttcattatgagttgccctgacaacctttattaaatataatttattatttattttaccaaaacaatccacgaagtaaaaaatacagcctcaaaaaaggctgtatttaaaattacttaataattgtgattgtaatatgacgacgaccccaactcttacatgccgcaacagttggaaaatgaacatcaataatgtgacctttaatcgcgctacccatgtcaccagcaattgcatacccgtaaccaggtaccaaaacaagtgagcctaatggaatgacactaggatcaacggcgatacaatttgggtttttagttaaatcaattccagttgcaccaaaatggctcaaaccaggttcggcagttgaataagccgttgcttgcacttgaatcgcttgtccggccttgccatcagcagcgcttgctaaatcggcttgctgggcatttgtgtccacaactggtgcaattggcgcttgtgttgcttcgtcggccgcttttttagctgcttcagccgctttggcttcagcttcttcacgtgcttgttcttctgctttttctttagcaatttttgcaagatccgcttggctttgacttaaattattctttaagccagccacttgttgttccagttcgacagattgttgatccaaactgcttcgttgttcatcaagttctgtcttgctagcttgtaacttatcttgaatggcttgtgtatcacggtaactctgtgctaattcatccatattatggttgtcagcactttgaagaaccgtcaatgtgtaagcccggttgaagaaatcactcaaagaatcagctgacaatagtgcgttgacaacgttgcggtcatcggctgttcgttgaagtgattgcaagcgttccttagcatagcttttacgttttgctaaagtggcttgttgctttttcaaaagcgtttgtgcttgttcgatatttttttcgttatccttaatcttttcctttaaggcattaatttcttgatacttcgcattcacgctcgttaaagtggcttgaatcttcgaatttgtatcatcaatacttttttgggtactgctttcttgggcttgtaattcgctcaaactggcagcactaacagatgtgcccatcgtaaccattgcaactaaacaggtaacaacagctaacgctagttttctaaatcgcatcttgttaaactcctccattcataactcagacttgattatacgcaacaatccccgcaagaagattgcagattaatgacgttatattacagtttgaagacatttataatttttgtgtaataaaaacccacttgtaaccgccgacaaaccaaatacttccaatagaaaaagctaccacaaaagtaaattttgtgatagctttttgactttatacttagattttaattaaaggactaacctttaatccgaactgcgcgggccatttcacgatcttgttcttttcgtttcagtgtttcgcgcttatcgtattcccgtttcccttcaccaacgccgattaaaactttggcaaagccgtgtttcaaataaacccgtaacggcacaatcgtaatccccttattcttcgttaaagcaccaatcttggtaatttccttcttgtgcaacaatagcttccggttgcgcaatgggtcatgattaaactgattgccttgttcataagggctgatatggacattttcgagataggcttctcctttacggacgcgggcgaacccatcacgtaagttgattttgcccttacggaccgatttaatctcggtaccagtgagcactaagcctgcttcgaatgtttccaaaatattataatcgtgaccagcttttttattctgtgcaattaaatttgctggtttttgaggatgtttctttgccattcaatcacctactttttaaaagtacgtttttgtgagtccttgttcgcagctgggcgtcttggatgattgtttttcttttgatcaccacgacgttgaccgcctttttcatgatcacgtgggcgtgctggacgttttggtcgtgcttcaatcttgcttaagatttcagccgaagccaatggcacttcttcaccggctaataattcaaagtccactgagtgggcatctaaatcaacattcgcgaccttgacccgtactggttggccaatgcggaacatcttatgcgttctttcaccgacaagggctaattggctttcaacaaagctatagtagtcatctttcatctgtgagatgtggacgaggccttcaaccgtgcttggtaatgcgataaacatcccaaagctggtaacagaactaatcacagcgtcgtattcattaccgaccttatcaagcatgtattcagccttcttaagatcaacgacttcccgttcagtatcgattgagcgacgttcttcaagggatgtttgttctgcgattggttgtaacttaggtgcccatttttctttttcttcaatcgtcatcccatttgtggcataactatgaatcaaacgatgaaccatcaaatcagggtaacgacggattggagacgtgaaatgcgtgtagaattccgcacccaaaccaaagtgaccaagggattcatcagaataatgtgcttgttgcatacttcttaataacatcgttgtaataatcggttgttcaggttgaccttcaatttgcgtcaagacttcttggagcatcattggcgtcactttcttacttgaaccgtgtgcttgaatcccataagccgtgataaattcaaagaaattcttcatcttatcagcatctggtgtttcatgaatccggtataagaaaggtgcattagcagtactgtaatgttctgcaaccgtttcattagcagccaacataaatgattcaatcatgcgttctgaaagaccgcgttggcgtaattcgatgtcgatggccttgccattttcatcaacgataatcttagcttcgtcttcttcgaaatcaattgcaccacggttatgacgcttcttcaagagaatttcatgtaattctgacatcgtttcaaacattggcacgagccgttcgtattgcgcccgtaagtcagcatcttgatctgttaagatcttattgacgtttttgtatgtcatccgcgctgttgacttaatcacacttgggaaaatcttgtgatccactaccacgccgtgttcattgatttccatttcacacgttaaagcaaggcgttcaacgtctggatttaatgagcaaatcccgtttgataagcggaatggcaacattggaatcacgcgatcagttaaataagtactagtcccacgttctaaggcttcaacgtctaatggtgaaccttcagtgacgtagtaactcacgtcagcaatgtggacccctaagtagtagttgccgtttgccaactttttaacgttaactgcatcatcaaaatctttagaatcgtcgccgtcaattgtcacaacgtcttgatccgttaaatctttacgacctagtttatcagattctaaaaccgtatctggaatcgcttctgattgaagccgaacttcttctgggaagtccgtcttaatatcatgttgatacacgattgataaaacgtcaacgccgggatcattcttgttaccaagtacttgtttggcaatccccagcatttgacctggcgcctcaacacttgggtaaccggtaacgtcaacttggaccatgtcacccttttgtggatgtaacccattatccgttaaataaattcggtaattacttaattttttggcatgactttggatgtatccaatccagcctgttttttctttttggatatctgaataaggcatgaattcgccgacgatttcttcaatcccccgcgtaatcactttcgccacttttccttcaggaccgcgacggctgttttcttcggcttctttaatgatggccacttcaaccgtgtcaccattcatcgcaaaattcgtattgggtggggcgataaagatatctggatcattaggttccttatcaacgattgaaacgaagccaaagccacgatcgttagcatggaagaccccttcaacaaggcggttgctggctggtaatctgaacttaccggcatcgtccatattcaatgtcttatccccttctaattctgctaatactttcactaggtctttgaacccttgtgaaccggcaacgccgattcgttcactaatttcggatacgtttaattgttgcgttgcatctgcttcaaaaattgcaagaatcgctgctttcatctgttcaacttgtgtcacatcaacacctctttctcatttcttaaaacggtttataaattctaggacatctgtttctaattggtgatgcgcactatcgaccgtaatgacgtggccggcttgtggataccaatgataatcaactgttatgttttgttgcgttaattgctggtgtaagacttgggcttgcgttggatcaataacttgatcttgtccgccttggccgatgaagaccggtttatctccgatttgcttcaagtcagccacaacttgtcgactgaaaatatcaattgatgcaagttgttgtggtaattgctgattaatagtcgccaaacgtgctgtctgttgcgcagctgggacgcccattaactgcatgattcgattagcatattggccaaagagcggcgtcaatttagcagtcggtccttcgagtactggcgcactaaaaatcccaccaccacaaacttgtggtagttcttctaatgcccgcatggcaaacaacccgcctaatgacaatccgaaaacaaataacggttgtttgttagccgcggataactgctcaatcgcagccaccgtatcggcccaccatgcatcgacagaaccgcgcgttaaaatctcggttggatcagccgttgcatgccctgcaaactgtggtgcactaaccgccagctgatttttctccaaaaagcggcccatcatacggacatcattagcactacctgtataagcatgtaacaacacaaccccgactgaaccaccgtcaaaataaaacggttgcggcaaccgataagacacgcgctcacccccaaagtccttactgcttgaattcatttaaaaaggtctcctgccattcaacaggagaccgcatcaacgttcttattagaattcgacccgtctcacatgtattagtgtgatgataagtacactaaagctaatgcaaagacgaagaataaagcccctaaaacaacggttactttctgcatgaaagcttcgaaaccacgggccttttgcttgccaaataaatcaccagaaccacctgataacgcactcaaagcatcctgttgtttacttggttgcatcatgactgcgatcacaatcaagattgaatcgattaataataagttcaggataagattttccaacctaattccctacctttctatctacactgtcttttaatactttagcataaaaagtagttaatcaccacttttttatcgattatttcacgagattctcatccgtatttcgcaaggcttgggcagcgtcttcaatttgccgccgcaccgtcgcccgtagctgatgatccgttaacacaatcaacgtgtcaccagcacggatcaacgtatcaccatgcggaatcagttcggattcgccacgaacaatcgcgattaacaaacatgtctttggccagtccacttcacggacttggcgatcctctaacggtgcgcccgcaaacactggtacctccaagcgatcagagaatgttgctaacttacgatgtggtttgccaagtgcgcgttgcaataatgatgcgtaaattggcgcgccccccattaagtcaacgacgatgtaggccaccaacgataaaattgctaatggcatcaagtgcacgagcgaacctaccatctcggtcactagtagaatggccgtaaatggcgccttcccgattccggcaaagtaaccacccatcgcaaaaataattaagttgggaacataaactggtgctaaccaaccaagttgaaccattatgagtccataaagggcaccgattaaagctccttgtgataaaatcggtagaaaaatcccaccaggtaatcctgaaccgtatgaaatcattgaaaaaacaaaccgtaataggaatagaccggccaccacactgattgtcggtaaattttgtccaaggtgtgcaatcaatccattgccaccacccaaaatttcgggccagaaataaccaatcggcaaaacacataataatggcactaatccggtatacgcttttggcagcgggagcttcgcataaagttgtggtaactacaataataccttctgataaacgtatcccaacagtcctaatacgacaccaagtatcaacaaatgccaatactgattaattggcaaactttgggagtacgtaatatgtaatgtcggtgtcaaaccaaaaaaatttaatgaaatgaagttcgctgcaattgcgctagcaagcgacgtcacccaaactaacggtgaaaagttatggtagatttcttctagtacgaaaaaggtcccggcaattggtgcattaaacgcagccgataagcccgcggcagccccactagcgattaaaatccgacgatcagcaccgcgatttaccaacttagcggcgaccccctgtccaacggcagcccccagctgaatcgatgggccttctcgtcccaagaataagccaggtgcaatacttaaaatgcccccaacaaatttacgccacaggattgaccaccaattgaaatcaaactcaccttccaattgtccttcaacttgtggaatccccgaaccacttatattcggttccttttttaataattgtgccacaagcaggccgatcaataaattggcaccaaccaatggcacccaataccacgggtgtgcatttaacccttgatagatagtgataacaaaggccagtcctttttcaatcgctaagcgaaataaactgaccaccaatccagtgaacgccccaactaataaccctttgcccacaaagcgaaaccgtgtcttattaaactgactagcacgtctaagtcgtccattttccacgtttgcctaacctccatctgataatgctttatatacagactaccacggaaatggggattatcaaatgttgaaaccaaataaaaaggcgagcactattgctcagcctttcattgatagatatcaattttgtatttcaatttaatttcataaaaaagcctttagattagtttatctggtttcgctataacccatcaatcagctaccaacgttttaacttgataggtaccgctattgtgcataacgtttacccgatacgttttacccgaaactgttaaacgcattggtgtaaagacattgccgcttaattctccctcaaaggcctggccaaacactattgtccctatgctgtggtcttcttccatgacaagaatcgtatattttttaaataggtcatttgcaaaagtcaccatcattttggcatctttaagcgttacatccgcaataagcgcattcaagaataactgttgtgcctccttcatttttttcgctagcgcttctttgctgtcttgtggtaactgatttacttgctgccatgctcgatctaacacttcttgcgtcacatttggtttcaacttaccgtcctgttcaaataaatccgatactaactttctagcaacaagcaccgattggctaatcactttcactagataagtgccatgcggtaaagtcaccgctatcgagatcgcagtggcatctttttggtttggaataatcaattgatttccttcaacacgaccaacattcggcttaccattcgttacttgagcaatcgtatgtgtatctgcttgaacttttaaatcgtcatattccttaagttttccatcagcaaatgtcaccacaagttctgattctgaattcagttcaatttcaccaactaatacgtctaaatatctttgttggagctttttaaccatctccattaattcttctttatcagtattaggttgtagtgcatcaacctgtcggcgtagattgtttaatttatcttgcgttagaatcgtctcgattggttttgttgtgtttaaatagttttccaattgttccctaagcgaagtcccactgatcgattgattaaaccgattataagtcccattggcattttgttgttcaatgataatcatatcggttacatcaagtggttcatcaatctgccaaatatcattaataactatcccattagctggtttcttatcagccaactccgcgatcaccttgccatttttcttaacaattaatttctgatccttaaagatattaatttgatagtttgttaagtcaactttaatcccttgtttactgagcgacacagccttcattaagctcattggcaattgttttttagtttgattgtcatttaaccaaattgggtcagccaacgttgtgtagttgctgattttcttctgtacttcttcagaaactttaaatccccattgttcataataagggagcatattatagcccgttacttcagagacatgtaacaaaaaatgctgcattcgatcttcatttgaatcataggctaactgattttcgcgataatactgatgtaagatcgggtagaaatcatcgccaaaggtgtttgctagttgggcaaacattgtcattttgacaaagtccccttgttgattgaagtttttatgatcagaatttagataggcgtacatttctggataatacttatctaaatcaggcatcgcacccgtcatttctttttgcgctgctaacgaataaatattaacactcgattcgacaacttctctccatgtccatggtttttgttgtctctgatgaccactttcatgccagatttcccaaggatcctgaagttctaataaacttttcatagctgcatcgtctttaaaacccatgtattcgtttgtcgcatacatataatacgatggcgattctaagaaatgttgtaaatggcgatctgaaaagttaaccggccgaccttcattactgatccctgaaactcgatcttgagcgaccaggaatcggtcataattagccattaacgctttgggatcccccaaatatttctttgccatctcataactcacagtaattaaagcacgatcactaacaagttgaacatcttttgcgtctgtcatttcagtcatttgtttcttaaaatcttcgacactcgtcttgtttgcatcaaagaacggcatttcaccagtggcatcaaagattgacaccctagtaccgcctgaatcatttggattcgtcacataaatagggccatcattttcaactgtaatagtcgtcaccccatttacgagcggatatcgtttctgaacatctcgctcaggcgagccaatcgtcagagacatcaagtcttgacccgttttgctcaccgtcagcacgtccccttttttggcgtataatccggaaggctctaagcttgaataactcaaggccctttgttgccgagccaattctttattaacatcaccgcggccaatatacagttttgaatatggcgccttttctgaacgtgttacacccttctggtgcctcaccttaggttggaggctatcatcaagcacctcactttgcttactttggtaattagaactggtcgtagcccttgcttcttgtaaaatactcatgcaactggtcgttaaaatgccgaacgctaaaatacctactacttttttgatagtctcatctcctaaaaaattatttttggaacacatttaacttaacacgcttcatcaactccgtctataataaacagataattgtttccataaatattatcgacacataaaatccatattactgcgataaacaattagaccgataagcatacaacacgtattatacaaataataaaaagcattcttcccgctataccaaaccaatgaaaaagtcgtctaaattcgtattttaatccccattataaatcattatttttttaatattccaagaaataaaacacgtcaaaaaggccaacgctaagaatttaacgttggctttttaaaaatgatttattttatagttgcgtactaaaaaaatctgtaattatgttcatcagcgctggcttcaccagatggcgttcaccatttgctgttaaaaatgtcacgtttttggcataagtttgacctttaatctgctgttcaaaagctgctacttgttcatagggaattcgttcatctgctgtcccatgccagaataaaacaggccgttgagcaattgcctgcggctgttcagttaaatcgtaggccgttaaccaacttgtcaataaccctagatcgtcaggttgtgctaactgatgcgcacggatattttcacgaactaagcgcgcataggctagcggtgccggcgagcccatgatacaagccgccactttaatttctggatgcttggttaagagtgccgccgttgtcatcccacccatggaaacacccccgacgccgatgcggtcagcttgaattaaattaagttggtgccagtaatcaacaatcaaactgaattcggcaaggttggtttgaatactttgccaaaaagtccatgacggaatctctgaaacaggttgcagccgttcaccatgattcagtgcatccggtaataccacgcgcatcccagcttcagccagtttacgcgcttgcgttaaaaccaattcttttgctgaccgccagccatgatagtaaatcacgagtggtaatggctgatgacgttgttcgtcagcgaccacttccaaaaccggaatccctttaatctggcgttttaagactaataccattagtgaaccctcccccactatttcaagattactataacggaagttggcggggttgtcatcgaattagaatttttcgaaaaataaaaaagccaccagattgatttaatcgggtggcttaaatgtgctttttgaaactgacctttccggttaacctaaaaatagcggttatggctaaaacccgccataatcgctatttttttgttaatcctcaaggtcaaaccgtttcaaaggcactctgtttttaaacatgctttttaaagctgactcttgtgctttgctacatatcgcaaacaatcgactgcgtcgcttattcacgatattaggcaaatgctcagagtcaaaccgctttaaacgcactctacattgcttttggtgcttgtacgcctaataagtctagtgaggcttctaggactgtgctgacactcttcactaatgaaagacgcgcatttttttgatcgtcgtctgccaaaatttttgagtttgcgtaatacttgttgaaggcttttgccaagcgtaatgcgtatttggcaatcactgatggttcgtattcttggctggctttgacaatcacatctgggaagttgccgagcatcttcaagacatcccaagcgttggcatctgaaacgactaagtcagcgtccattgcgacttcttggttggccttgcgcaagatactttgggcacgggcatttgtgtattgcacgtatggacctgtctcaccttcgaaacgcacaacttcttctaagtcaaagtcaaaattatctaaacgatcattcttcaaatcatggaaaataaccgcaccgatgccgacttgttttgcaacttcttctttgtttggtaaatcagggtttttggcttcaatttgttgttgtgctaggttaacggcgtcatttaaaacttcttccaataagatcacacgaccgctacgcgttgataatttcttaccaccttgagtaattaagccgaatggaatatggtgaatttcgtccgaccaatcgttgcccatttcttttaaaacggccttcatttggttgaaatgttcccgttgttcgccaccaacaacgtacaatgattgcacgaagtcgtatgtgtcatgccgatacatcgcagcggctaaatcacgtgtcatgtagagtgttgcgccgtctgattttttaatcaaggctgggttcaagttgtaagctgttaagtcgacgatttcagcaccgcgactttcttgtaagagcccttttgcttcaagtgcgttgaccacaccgtccatcttgtcgttatagaaggcttcaccattaaatgagtcgaattcgacccctaacatcgtatagatcttttggaattcctttaatgattcagttctaaaccatgaccataacttcgttgcttcttcatccccggcttcaagcttacggaaccatgcccgtgcttcatcgtctaattctggatgttcaacgtcttcttgatggaacttaacgtaatatttcaaaaggttcgtgattgggtcttctttaacttcttcttcactcccccattttttataagctacgattaatttaccgaattgagtaccccagtcacccaagtgattgattttaattgggttgaagcccacttttgtcaaaattttggcgattgagttcccaatcactgttgaccgtaaatggcccattgagatgggtttagcgatgttgggtgatgacatgtcgattggcacgttgccccctttaccgaggtcactttggccgtaattagcggcttgcgttaagacggttttgaggatttggtcgctaaacgtagccttatccaagaagaagttgatgtatggcccgttggcaatcactttttcaaagccggcttgatccatttctgcgactaagtcttgggcgatttgttggggtgctttccgtaatgttttcgctaagataaacgttggaaaagcatagtcccctaagtctgatgtttttggtgtttcaatgagttgtgctactttatctgctggtaaactgtcccctaaaacgcccattaaggcagtggtgacttgttgtttaaaatccatgttgatagcctcctaatatttgtgaacaaaaaaagtcccttccaaataaatgaaagagacgagaattcccgcggtaccactctgattgatcaatcgatccactcaatagtatgcaattgttcaaccaaaagcgcgccgcgtcaacttgattacccaccttacaccgtctgtgagctcgctataaatcgctgttgatgctattcttttgactgttcgaacttgataattagtatatagaacttagctgcacttttcaagcgcaattattctgccgcgagggcttcaattggatctaacttagctgccttacgagaaggtgctagtgccgctaagagactgatgataatgctgatgattatcccgaataggacgtagccactggtaattgccacaattggcatatgcgttaatggttgggccaacgtattgacaagcaattgtccaaggccagcaatgccggcaccaagaacacttgataataacccaatcaagaaggcttctgagacgaataagtgccgaatatctttctttcgggcgccgattgcgcgtagaatcccgatttccttcgtccgttctgacacactgatgtagagcaccacgatgatcatgattgctgaaaccaataatgaaatcccggcaatcccagctaagacgtagaaggctaacatcaagtaagtgttaattgaatcgaggatcgcaccaacccctgtgatttggtaatccttttgtgtcttaccgttgactttgctagtgtaggttttgattttattttgaacggctttaacattttgggtcttattaaccgtgactgctgcaaagttgggtgcaaactctaatccttgcgcttggtacatcttggctaatgtgccatatgtgacggcttcagtcccagaattgatgatccctgaaactttcacatcttggcgcatttgaactggacgttgatccttactaatggcattgacgtaaatggttactgtccgaccaaccatcttcttgtaatttttatctaacttcttagccattgccttcgttaaaataatttcgttggccccaggtttagtcccggtcttaatatcttggacacgttcggttttattaaacgtttggaacatttggactgtttcactcttcttttgatagtgcacttggacaccattcatatagtagcccttttcaaccttcgtcacgtttttgaccttattaaggcggttgatatccttatcagctaagttaccttgttcaccggcttcaatctgtttgcgcgtgaggtttcttgcaatctgaatcgtatttggattaacttgcgatgaaatctgatcattaatatagccagtcaccccttgacccaagcctagcattaaaatgacggagaaaatcccaatggacgcgccaaaaataatgagcaaattccgtttaatatcgtagcgcatgtgttgcattgccattttgaaagcagacataaaacttaatggactactcttcttaattaccggaccagttggagctgggtaagctggttttaattgcttgtcataatcaatctgcccatcaaccatgtggacaacccgtgttccgtggtcagcaacggcttgtgaatgggttacggcgatgacgagtttgccatcttcggcaatcttttgtaagatttcgagaatctcggccgtattctggctatctaacgcacccgttggttcatcggcaatgatgacatctggatcagcagccaaggctctggcaatagcaacccgttgcttttgtccacctgacaattggttgggatgtttatggatatgttccttcaagccaacttgttccaataaggcggtcgctttggcaacccgttccttatgtgatagatcagtcatttcaagtgacaccatcacattttccaagttagtcaaatgactaattaaattaaagctctggaaaataaagccaatcgtttgactccgataagcatcaaatttcttttcggatgcattctttaaagatgtcccatcaacgatgagctccccatcgtagtggtgatctaacccaccgatgatgttcagcaacgtcgatttaccgccgcctgattccccgaggattgaaacaaattcgccacggtcaaagcttaaattgatgccttttaagactttaaattcagccttgttcatataataggacttgtgaatatctttaatctctaataatgtcaatgtcgtacgctcccactacttagattgctcgtaagtgtcacgattttttagtcgatagataataaatatactttatcagagcgcctttaaacaaacaatcggccttaggtctgataacgaaaagagtgtgatgtaagtcgggtatccgccgaggattaaatttcagagaataaaaaaagaggttgcaacaaaatttcttctgttgcaacctcttttgcatgaatctttaagcgagtgacgggaatcggacccgcgacgcaagcttgggaagcttgagttttaccactaaactacactcgcattacttgatatagtatagcatattatttccgatttgtgcatattttttgaaaaaaaaaggtttaaacgcttaacaaatagcgtatgtatgcggtatactattgataacaacttgattggagtccttttaatggccgattcgcaaaatacaattcctgaatcaaccgcatttcattgccctgcatgtcaggcgccaattgaatatggtatcaaacgttgcccaggctgtcagactgcgatcttctatcgcgatatgtctgaaacattctggaacgatcgtaaattaaatctttttaaacaaacggatgccattcaacggggcaattgacttaaattaactattcaaccgtcactttttgtgacggtttttttaattgttaataattaattcagaaggcgttaccattgttaatttgatagacttcacgactcattttagccgcatttttaatttgaaaccaacggtgatggttgctataatggcacaccatacacaggaggtctttatgatagagaagaacaaaatgagtttatttagcctagtgatgctaggtttaagttccatcatcggttccggttggctgtttggtgcatgggaggcaacgaccgtggcaggcccagcagccatcatctcttggattgttggcgcaattgtgattggtgcaattgcctttaattacgttgaactcgggacgatgtttcctgaaagtggcgggatgagtcactatgcccaatatagtcacggttcattactcggcttcatcgcagcgtgggccaattgggtatcattagtcacgattatcccaatcgaagccgtcgctgctgtccagtatatgagttcttggccatgggcgtgggctaactggacgaatcactttatgcaccacgctgaaatttcgaatcgtggcttgctcgtcgtctttgcctttatcatcgtcttcacccttttaaatttctggtccgttaaattcttgacccgttttaccagcttcattgcaatctttaaattaggtgtgccattattaaccattattatgttagtctcaactggtttccatactggcaacttcgggcattcaatggcgacgtttatgccctatggttccgccaaaatttttgcagccacttcgatttctgggattatcttttcatacaatgcctttcaaacagtaatcaatgtcggcagtgaaatccgtgattctaaacggaatattggacgtggaattgcaatttcacttgggatcagtattgtgatttatctactcttgcaaattacctttatcggttctgtttcacccgccttgctcgccaaagtcggttggcacggtttaaacttccaatcaccctttgccgacttagccattttacttggaatccattggttagccgtcttactttacttagatgcgtttgtttcaccctttgggaccggcgtttcctttgtcgcttcatgtgcacggacattagcagcattaaagcagaacaaacacatgccaccgattgtcggccgcatgaacgaacaatataatattcctcgcattgcgatggccattaacgccatcgtcagcatgctactcgtttcaatttttagaagttggggaacgttagccagcgtgatttcaaccgcaacgttgattgcctatttaaccggcccggtcaccgtcatgtcattacgtaaaatggcccctgatatgaaccgccctgttcattcaccttggatgaaaatcatgtcgccattatcctttgtccttgccagtttggcaacttactgggcaatgtggccaacaaccattaaggtgattggcgtcattatgcttggcttaccattttatttctactatgagtatcggattcactgggaaaatacttgggcccaattcaaaggaagcttatggttaattatctatctcgcattgctttcgctgatttcattcttgggcagtcgggaattcaacggaattaacctgattccttacccactcgatttcgtcttaattagcgcattagccctcatcttttactattggggaattatcagtcgcttctattcgaaatacttctcacgcgcaacacgaattaacgatgatgtgcaactttaagcatgactaaaaaggacgccaaacaacggttaaagttgtttggcgtccttttggtatctctagattgtttctgctaaaatgaatcgtaaagtacgttatctttttcgggaggcgctaaccaatgcaaaaattgaccgttcaatctactgatcgaatccatactttaaatgtcgtgacttggtttccaatccaaaaaccggtcgcagttgtccaaattctaactgggatggccgaatatatcgaacgttatgatgctttcgctcaattcttagcagatcgtgggattatcgtcatcggacacgatcatattgggcaaggccactccgttcagtccaacgatgagctcggttatttcgggccaaacgggctccagacgctagtcaacgattgtaccttaatcggtcgcattgtccacgaggaatacccagagctaccattatttgtgctcggacactcaatgggctcaatgctagcgacacaatatgttaagcaaactgaagtgccgattactggagccatcttcatgggcgttatcgatgtacccttcattcttaaacccgccttaccaatcgttaaattaatcggcgccattgcagctaagcgccccggtactgtctggaataacttggcgtttggggtctatcctaaacgatttgatgctcaccgacctttttcatggttaagttacaatcaagcaaacgtggcggcctacgaacagcatccattgtgtggctacgtcttttcaaatagcggttttgcaatgctcttcaccctcactgagttaactcggcatgctgattggcaacttgccttacaatcccgcccagttctcgtaatgagtggcgccgacgatccagctggcggttatggtcgccgcgcgcggcatttaacgaaccaattcaaaaagcgcaccgttaacaacgcaacggtgcgcattctacctcatacagcgcatgaaattttattagaaacagatgctacccagcattaccaattcatctacgattggttgactaaagtaatttctgaatctcctttaacacaccatagttctcattagtgtcggcacgataagtcgcatattggatcatatcgtcggcagcattccccatcaaataactatgttcaacggtttgcagcatttctttatcattataagtatccccgaaggccatcatttgcgccggcgtgatgttgaaataatccgccaaaaagcgcattgcatggcctttgtcgatgccttgattcataatatcgatccattcaacaccagcaaccgttactgaataagccggttcaaattcgggtgcgaaaacagcttcatactgtgcttgactatcttttcccgggaaataaatcgtaaacttgttggcttcaacactaacctgcgttaaatcaggtacatattcaatgttggcatagaattgccgcaaagtcgcgtcataatctcgatattgtgtttcaacgtacgccgcgtccatcccacaaatcacgccaatcccatctggcgtttgattaacgaattggaccatccgttggtaatcagctaacggcaataaacttttgaataaagtttcaccttgataaccaattgcacccccgttatcgctgacgtaaaccattgtgtcagcaagttcgggaaacatttgctttaacgtgtacattggtcgaccgctggcagctgcgaattgaacccctttagcatgtaattgctgaatggttggtataaagtttggtggcaactggccactctcagttaataaggtatgatccatatcggatgcgattaatttaattgtcatgcttagttctctcctatcccttagataccttaataatataccgtttatgccaattcatcgcaaccggttacattcaaaaataatcatactcgacatccatcgcttcgatcctgcccattaacacgcgctaaactaaataactcccccgttcagattccgatagtctctctaaaagatttgaatctcattgatattgaatgttcttttaaccgcgtcggacattagcgcaatttggttatcaatttcatcccaattggtagtaacaaatccagaatccaaactatcaatcatgtcattactgtttagtctaatctttaataataactgtttccccttggttgtaagtcgatagtatactttacgactatcaccaataaaactccccacattagcccgttcaattaatcctttttcacccaacgattggcattggcgggaaatagctggtcgagaaacgcccatacaagcagcaaggttgccgggcgtttcttctttttcacgatccattttttccatcaacaaatattgttcgagtgataagtcaacattttgcaaaactgtgacaaataattgatccaaaatattacgatatttaatgagcattaataattgattattcataataagcattactccttctatctattttgaggacctacaatatgcgaactagtaatcctgctctgctccacaggcattatattatataaattaattaaatgtaaatagctgaaattaacggtattgacaaaaaaatatttttaataagttttaaccctattaatatttttttattgaaattcgccaagtttgtgatgtttttatttattaaatgaccttttaatcgcgatgcagtttacagcttgtagctttcagccgtttttatagttcaaataataattatattgataagaaaatatttatttaaagctatcgttttctactaatggtttaattccttaaaattgatgcaacttttttgaatagtgctaataattgtcgctaatccattggctaaaccagtcataatgaggtaaataatcaataatcgatgtactttttgaacaaaaaaagaccgctatctaaagtgatagcgatccttttttaatccataatgcccgtggcaggattcgaacctgtacttggttacccaaacagcgacctgaacgctgcgcgtctgccagttccgccacacgggcgattgtgctacaagactattgtaccagtgttacagagccctgccaatacccatttattaatatttcgcttataataatagttgataagggagggattcagatgcaagtcatcacaaattcaaccgttcgtgcggtcctgcaggcacggcctgccatcagtcataaaggcgattttggccgcgtcttaatcattggtggtagtcagcaatacggcggtgctgcgattatgagtgcctctgcggctgtttatgctggtgctggattagtttccgttgctagtgacttaagtgttctcagcggactgcacgcgcgcttaccagaagccatgttcattgattatcaacaacccttcgtgcagtggtcgtctgcagtccaggctgctgatgtcgttgttgtcggacctggtcttggcattacttcgtttgccgttgaactgctgagaaaaatcttacaaaccatccaaccaacacaaacactgattatcgatggttcagcactatcaatcatcgcacatgaaaaactgacgatcccgaatacgcaactcattttaaccccgcatcaaatggaatgggcgcgcctcagcggcattgcaatcgagcagcaaacggttgctactaatcaagccgcactcgctgcttatccaaacgcgactttagtgcttaaaaaacatcacactgaggtctatcatcagcaacaggttcagcaactaaccatcggtgggccttccatggcaactggcggtagcggcgatacactgactggtattattgccgcattctgtggtcaatttggcacccactatcagacgatttgtgccgctgtttatacccacagtgcgattgctgatgaactcgccaaaacccaatacgtcacacttcctagccaagtgattcagaccttaccacactatatggctaaaatgattcatcaatcttaaaaaaacagcagtccttttgaaagggctgctgtttattaattcgctttaagtaatgcaagttctgcatctgtcaacgcacggtattggccacggtctaaatcatctggcaatgccagtggtcccatcttaagccgttctagcgtcaagacttccttgccgaccgcatgaaacatccgcttcacttgatggaatttaccttcatgaatctcaacggtaatctgactttcttgttgcgcctcatcaacactcagaatttcaagctgtgctggttgtgcagtaaaatcactcaacacgagccccgcttcaaaccgcgcttgatcctctgccgtgacaatcccggcaatcgtggcgcgataaaccttgctgacgtgttttttaggactcaacaaggcatggcttaaatcgccgtcattcgtcaacaataataagccggttgtatctttatccaatcgccccactggaaacagatcatcccgcaagtccgctggtgccaataaatcaagcactgttttctggggatcagtcgtcgccgaaatcacacccgccggtttgttcatcagccaataaaaataggtttgataacgcacgggttcgtcgtcaacatagacaacggtcgcctcgttcactttgaacttcgcatctttgaccacagtcccatcaacgcgcacgcgtcccgctttaaaaagtacctttaattctttgcgtgaagccacattcatatgacttaaaaagcgatcaattctcatttgattctcaactttcttctaaaccgatccaagttactcccaatgacatagtccgctaagcgcgatttaagcaccaatgcggcgtaaacagccacacctaggccaacgctaatcattaagactagaacgctctgaagacggctgtacgggttaaagacaaggtataaccccttgactgcccccgccgttaccaaatacatcaccaatgagaagcctaaaacgccgattaagcgccgaatggttttgcgtaatgcaaagtgataatagcgatgcagtgctgcaatcattaaaaccgaacttgtcgcaaaggctaagccggtcgatactagcgggccatagacacggaaaaaataaatcgctgggtactgcgccacaattttgacgatgaatccgatgaataagtaaaacaatgccaagcggttctgatagaggccttgtaagacagcgcctaaaaccgtaaagaggccgagcataatagaaatgtaagatgaaaattgtaagacactaatcccaagcatatcatgcgcgtagaataacgtgtaaagcggaccggcaaccgccgccatcccaaatgccgctggaatcatcactaagttgaataattgcaaagtactgccgatttgatgttgcaattctttttgattgccccgcacatgcgcagctgacatcaatggaatcgccgtgaccgccatggcagcagcgagtgaaacggtgattgaaatcagtttattcgcattagctgcaaataaagcatacaagttatacaactgatgatcactggcaaccacgaaatcatgcatcatcggattaaacgtgtattggtcgatgatatagaccaagttgacacttgcgtcgattacgatgaatggaattgattggcgcacaatcccttttaacaagtcagtcgttgacacttctaattcgttgttactattggccactaactctgaaatgcgaccgcgttgtttcaaataatagaaaatcagtaataacaagccggcagcagccccaatgaatgcggcaaatgtcgcctgcgtcacagcatccacgtagctgcctttaaacacttgcataatcataaaagcggtcacggtcatgtacagcacgcgggctgcttgttcaataaattgcgaaatcgcagacggcgccatttcggcatagccttggaaaaagccccgcataatactgagcaatggaataatcaatagcggccagcttaatgaccggaagaccggtaccatccgcggatcacccgctgctagaacgggcgctaacgcaaagagtgcgagcgctgataaaacacccattgccaacattaaaatcagcgactttctgaaaagacgctgaccaatgccatactcattcatttcgttatagcgtgcaatttgtttcgatagcgcccctggaatcccagccgtcgagatcactaaaaagacactataaatttggtatccttttgcaaataatgtgttggcttgtaagaaattcgcgccaaaccagattggccacggaattacatagacggcgcccagaattcgcgagaaaatactcccagcggtcatccaagcggagccccgtaacatcttactttgtgaagatctatccgtcgcctttgtttcaggtgaattggtcatttcccataactcccttattaaacgtcaaaaagcatcttcctaccattttagaggattgccccaagccttgcaattcctttaacaaaactttatgaaaaagagtgcttctgatgacggttagcaactgagcattaatacaaaattcccaataatccaggttttaagattattgggaattttagattaagcggaagttgttgtcatcagaagcacgtttcaataagagtgctattagcgcttgcccagattttgagcactaacctaaaaacgggaattatggcgtactcggccatgattcccgttttgtagttaggcgcagaaatctagcgccaatagcacgtttcaaaaaagatccccgccttcgcggagccctctgccatctcattatttagcttgtttactttgttgaatcaaataccacgtcaacagaatgctgacaaaaaccatgataccgccaaagattggtgtactgtctaagccccaagctgccgatgcttgcccgccaactaatgagcctatcgtaatcccgatattaaaggctgagatattcaaagccgaagccaatggaatatcatttggcgtgattttttcagccaactgcacaatgtataattggagccctggaacgttcatgaaggcgaaaaagcccatcaataaaacgttaattaaaccgaaccaatggccatttaacgttaacatgaatagcaacaaggttactaacaagccaacaaacattttcaatagcgccatcaacggttggtgatttgaccatttgccacccaacgtatttccaaaagccaccatcagaccataaataattaagatgatcacaacggcccttggtgaccaacccatttttgattctaaaatcggcgttacaaaggtataaaccttaaacgtcccgccataaccaagcgctgtgattaataaggctaccacaattgctttatttttaaatacgcgaatgatcccgctgaattgactgggttgtcccaatagtaaatcattaggcactaagaaccagttcgcaacaaggcctaagacaccgattgctgcgataaaaataaacgacatgtgccaagttgaaacctgaccgatgaacgttcccagtggtaccccagtcacggtcgccaccgtcaagccggtgaacatcaccgcaatcgcgctagcgcgtcgttctggttcaacaacatcggcggcaaccacggatgcgattgacataaaaatcccatgtgctaatgatgaaataatccgtcccaccaagacgacggcgaagactggcgcaaaagcgaccgtcaagttaccaatgataaagacaaccataatccccaacaataaatttttccgtggccaacgacttgttaaaatcgccaaaatcggtgccccaatcgtaatttccaaagcatacatcgatacggttagtcctgcttgactcatcgtaatcccaaaatccttaatcatcaatggcattaagccgacactgatgaattctgtcgaaccaatcgcaaaagcactgattgccaatgctagtaatgtgaggttcgcccgttgtttactactcatactgccacactcctattagacttttttactgatgtactatattattcaataggagcgtcattttcacaatcacgcactttttagtcagtaggttactgaaaagtaataattgagtcttatcacaatgaaaaggtgaatcaaaattagaaatgaatgagaaaacatataaaattggcgttgaagctacgatggaaattatcggcggtaaatggaaacccgttattctttgtcatttgcgcaaccaaccacggcgatcaagcgagctcttacaacgcatcccaaagatttcccaaaaggtgctcactgcacaattacgcgaactcgaaaacgatggcatcatcaatcgtaaaatttatcaagaaattccgccacgcgttgaatacagcctctctgaatacggtcagtcactcaataaaatcttaaatctcctctgtttatggggcgaagataacattgatcgccgccaaacagcgggtgaatcaatcactgttttacatcgcgatcaaatcaatccaatcgaataaaaaaaagacagccaactaggctgcctttttgcttgtaattatttttgccgaccaaatttcacgaaataaataaccaccatgatcattaagaaaattaaaccaacaatgattgaaatccgcgtttccggattaatgaacatgaagattaaggtgatggctagcatcgccaatgtaatgtagttcgaataaggtgaccaaggcatcttaaatggatgttgtgccatcttgtcagcgtgttgttttctaaaggcaatttggctgatcaaaatgacgaaccatggcaccatccctggtaagacacttgaactataaacgagcacgaagacattgccagcttttggataaacaagtggtaaaatggcgtttaaaatcaccccgattaaaatccctaatgaaatcgccccgaccgcataaaatgggacaccgtggcggtttaatttcaagaatcgttttggtaactgcccattattggctaatgtgaacgtcattcgactggcactgtaaatccctgagttagcacccgataaggctgctgtaatcactacaaagttaatgattgatgctgcagcggtaatcccaattttagcaaaggtttgcacaaacggtgaaccgacctgactcaattcattccaaggataaatgctcaagattacgaaaatcgccccaatatagaaaatcaaaatccgcgcaacagtggattgaattgctttaaccaatgttgattgtggattttcagcctcgccagccgtaatcccaatcaattcaatcccttgatatgatgccaagacaattgccaaggcgaagatgaagcctttaaagccacccgtaaagaagccgtgcgtccacaaattactaatgccgactggatgcatatggtttccaatcccaaaaacaatgagtccaaggcctgccacgatcatcagaataatcgtgacgactttaatcaacgcaaaccagaattccaattcaccaaacatgctgactgaaattaagttggccgcacataagaacgtaatcgcgaccagtcccggtacccagcccggcaagttcggccaccagaattctaagtaaccgccgatggcaatcatttcactcatccccacgacaacgaattggaagacattgctccaagctgttaagtaaccaaaaattggatgcatatattccgttgcaaacttggcaaaggaccccgtatctggatcaacatacagcatttctccaagtgcacgcataatgagatacagcaataaaccagcaatcccatacgcaatcagcacagacggccccgtccatttaattgtcgtgttggcccccataaaaagcccaaccccaattgtcccgccaagtgcaatcatctgcatctgacgggcagttaaatttcgtttcatagtcctcaaacccctctattttagcatcatcattattggttaaccccagaatctaaatttacttatcatcgtataataaaaaacacccaaaagcaatagtcgctctcatctttttatcatcttaaaagcgctttagaataacccttatattaattgaaggataattaggcccctaaatattaattttaaataagaaaaagcagttactgcgagaaacagtaactgcttttttgaaacatgctttttggttgcaacaacttccgcttaatctaaaatttcaaataatcctaaaacctggattatttgaaattttttattaatgctcagttgctaaccgcaaccaaacgcactcttgtctgaaacgtgcttttcaagctaactttctgcgcttatcccagtgaatcaaacaatcgactacgtcgcttattcgcttccctctgataatgctcaaaagttgaccgagcttgaacccactctttttgaaacgcactctaattggcgacgatattgaccaatttatttggaatggcaatcactttgcgcaccgtcttgtcagcaatgaattcagctactttttcatttgccttagccatcgcttctaattcttccttcggtgtgtctttagctactgttactttggcctttaacttaccgttaacttggaagatcacttctacttcgttagcgaccaatgctgctgggtcaaatgttggccagtccacgtaactgattgagtcatcatggccaagcattgcccataattcttccatcatgtgtggtgcaattggcgctaataacttcacgaagccttcagcgtattcacgtggtagtgtgtcaactttataagcatcattgatgaagaccatcaattgtgaaatggccacgttaaagtgcatgctttcgaagtcttctgtcactttcttaacagtttcgttgtaactcttcttcaattgttcatcattttcagcgacaatcttgcttgaaagttggtcgttttcgtcggtatcttcttctgtgtatagacgccatacccggtccaagaatttacgcgcgccggctaagcccttttcactccatgaaatggaagcatctaatgggcccatgaacatttcgtataaacgtaatgtatcagcgccaaagcgatcgacaacatcatcagggttaacaacgttcccttttgatttcgacattttttcgtggttatcgcctaaaatcataccttggttatataggtgttggaatggttccttcgttggcacgaccccgatatcatacaagaacttgtgccagaaacgaacatataataaatgaagcacagcatgttccgcaccaccgatgtacatatcaactggtaaccagtctttcaacttatcaaagtcagccaatttatcagggttcttaggatcgatataacgaaggtaataccatgagctaccagcccattgtggcattgtattcgtttcacgacggcctttgcgcccattttcgtcggttacgtttaaccagtccgctaagttcgcaagtggactttcaccagtccctgaaggcttgatatcacttgttaatggtaattcaagtggtaattgagcttctggcaccactgatgttgtgccatcttcccaatgaataattggaatcggttcaccccagtagcgttgacgtgagaataaccagtcacgcaacttgtagctcacttgttcatgaccagcattatgcgttactaaccaatcaatcatcttgtcgattgctgcttgtttgtctaaaccatcaaggaaatctgaattaatcatcacaccaggttctgtgtgaacagcttcttcaggattaccaccagccacaactggtttcaatggtaaaccaaatttcttcgcaaattcccaatcacgagggtcatgtgcagggacagccatcacagcaccagtcccgtatgaggctagaacgtaatctgaaatccagattggtaaccgttcgccattgactggattaatggcgtaagcacctgtaaaggcccctgttttatctttcgccaaatcagtccgttcaagatcactcttgtgttcgatttcttttaaataagcatcaacagctgctttttgttcaggcgttgtgatatcggccactaatttatgttctggggccatcacgatatagctgacaccaaacattgtgtcggcacgcgtggtgaagacatcaatctgagcgtcgtggttttcaacagcaaatgatacttcagcgccttttgagcggccaatccagttgcgttgcatatccttgacactttcaggccaatcaactaggtctaagtcgtcgattaaacgatcagcataagccgtaatcttcaacatccattgacgcattggtttccggtaaacaggatagccaccgcgttctgttttgccgtcaatgacttcttcgtttgcgacaacggtccctaaatcagggctccagttaacagccacttcagcttcataagctaagcccttttcgtacattttttcaaaaatccattgggtccatttgtagaaatcaggatccgttgtattcacttcacgatcccaatcgtatgagaagcctaatgaattgatttggcgtttgaacgtattaatattggtttgcgtgaaatcagcaggattattcccagtatccaacgcatattgttcagcaggtaagccgaatgcatcccaacccattgggtgcaacacgttgaagccttgcatccgtttcatccgggccaagatatcagttgccgtataaccttcaggatggccaacgtgtaagccttgacctgacggatatgggaacatatctaatgcatagaaatttttcttatttttatcttctgttgttttgaacgatttgtgtgattgccagtaagcttgccacttttgttcaactgcgcgatgatcgtaagtcatatcaaacactcctttttttaacgtgctttcaaaagcatggacacttttgacacactcttttttaattcacttaacgccaataaaaaagtcctatggtataaataccataggacgaattgaccgcgatgccacctaagttctgtccaatctatattggacaactctctggccttaacgcggcagacgtttctatctactatcagttcaatagaaaactcaaaggcgagttcgttatgttaaacgacgtgttcacactaaccacacgctctctaaacgcttaacgataactactaatccttctcaacgttaaataattgttcttagcataccaaactcttacttcaatttcaagacttggccgactaagattaaatcagaatgtaaattgttcgctgattttaattgtgcgatactggtattatttttttgtgcgattgaccaaagactatcgcctgatttaaccgtataagtcttcccagaattcgtgttaggcgtcgttggcgttgtagcgccagccattaattttaagacttgacctgggtagataaagttattcttaatattattagccttgattaattgcgccatcgaaataccgttacggttagcaattccccagacagaatcgccggccttaaccgtataagtcttcccagaagcttgccctggatttgtactatttgtattattgttgtttgaattaccagttgttgcaccttggctaaccactaatttttgaccaggatagataaagttgttccggatattattccatttaaccaagtcagccattgagatgccgtaacggtttgaaattgcccagacagaatcccctgatttaaccgtatacgtcttgtttgaagtctgattaccgttattgctgtttgaattattgttatttgtattgccagttgcggtttttgaaactgttagaacatcgccagggtgaatcatattattcttgatgttattccaactaattaaatcgttcattgaaatcccatatttgttggcaatcgcccaaacagagtcgccggctttaacggtatacttatcaccattagctggtgttgttggattcgttggtgttgtagggtctgttgggtttgtcgtcccaccattgttgttgccagctgcactacttgaaacaatcaagacttggcctgggtgaatcatattgttcttgatgttattccagctaatcaagtcattcattgaaatcccataccgattagcaatcccccaaacagaatcgccggctctaacggtgtattttgtcccattttcaggtgtcgttggagtcgttggcgtggttggagtcgttgttcccccattattgttaccagtattggtccctggcgtgtcatattgcgttaaattgtattgttgaatcaaacggttcaaacttgacgcataattggttgctgttgcataacgtccttgtaagtattgtgtggcttgttgatagctacttgtatggctcttaaatgccccttgataataaggcgttgcaccaaatgaagtattccgtagcacatgcacataatcttgtaacgattggtagtatgaaggatattttctaaatgcagcttggatctgatacatgttcccatgaccatcatcttcccaagtccacatataaacagaactaccattgtaagtcccttttaccccaaacaagttataattaggggcagaacctaaaccactgctcccaaatcctgattctaatgatgcttgggcaatcataacagaggcatacaaatcgttaccacccgctaattgttgagctgaactagcaattgaattgatgaaattttgtgcgcttgaattagctactgccataacaacgccagcggttgcgatattggcactcgtactttgcactccagaaattggttgcgcttgagatggtgccggttgtggcgtagccacctttgtcgcttcattttcagtcaattgaggttttacaacaggttgttgtgttgattgggattcagttgtcgttgtgcttgaactagttgttgatgatgttgcactacttgctgtattagctgttatagcttggtcatcattgtttgcactatttaacacatcttcagtggctgctttggcccgattcgaaaaactaggtgcaattgctgaacccatcaagacggttgcccctgcaaaagtcgtcacattacgaactttcttaattctaatttcccgcttctgcttatgtaagcttaccttttgagctgcaattcgctgttttctagtctctttcaattctaacgcctccgaatttccattattattgtctgtggcacaattaacttgagcttcacctgaactttattataatattaataaatggggaaaacaatcctatcacgcaactacttttattagttgtcttatgcctaataattattgtatcatttaataatcttctttgtctttaattacagcttattttgaaaggatttcttaaaaatgaccaaacgattttcggctagtttattcattcttggcacaatcagttttctaatcattttaatcagcgttgtgcaccatgccacttgggttatacattttgatacccttatcagaactggcatccggtcgctttcctccccattgatggatactgtaagcattgcgattacgtcgatcggcaatccctatagtataatgactttgaccaccattgtaacgcttggtttgctgggctttaaacagtggtcagcagctagctttttagtcattaacatggtccttttttcaacgcttaaccactttattaagatgagcgtccaacgaccacggcccccatttcaccatcttgtctacgcaggcggctacagcttccctagcggtcatgcttcgggggcacttctttttttcggaactttaagcatcctagtttactacttaattcgtcaacgcgtttggcgaaaaatagcgattggcacctgtttaatattggcactatgcatcggccttagtcggatttacgtacttgttcattatccgagtgatgtcttagctggctttttattagcaacggcgtgtctcggcggttcatggtactgttttattcattttaaattattgcatctgaaggagtcctaacacatgatacttgatcatcccactaaatttgcacattttctattagaccaggcaattcggcccggcgatgtcgtaattgatgccaccgtggggcatggcgatgataccttatttttagcagaacgcgttgctgattttggtcaggtttacggtttcgaaattcaaaaagaagccatcgaaacctgcgcggatcgtcttacaaaagcaaaccaagcgaaccaggttactttgcttaatcaaggacacgagcggattatcactgccttaccacccgagttaaaagtgcaagccgctatttttagcttaggcgcactcagtcctgattcttttgaacacgtgacattgcctaacacgacaatctctgcctatcatcaaattctctcacggcttaatcgcggtggcttactggtattcgttgttgatcctcggttcaatgaaactcaagaagaaatcgactatctaatcgccgacttaagtcgcctagaaccaaccaattaccaagtaacccactacaaggcaatcaacgccgaccaaggacaagtcctagcgatagaaaaaatttagagtgcgtcgtaaggcgaatatccgctgaggattaacacagcgtcgtgaatgattacaacgtaatcgtttgcggctcagggttaaccggaagcggatgccttacagagcacgtttagagtgtgatcccagtcgggtatctcttgaggattagcctagactggcgaatgattgctgaaagcaatcgtttgacaatcgtcgctaaccggaaagagatgactgggtgaacacgtttagagtgcgtcgtcagtcgattatctcctatttaaacattaaaaaaaggcccagtcatcattgatgactgggccttttactatcttataatgtcccgaccacttttgtaccgtgtgcttcggaaatttgtaaacgttctgttaacgcgtcgacattgtcggctgtaatgccaccgccaggtaaaatcacaatccgcccatcagcagcttgaattaacgtttttaaacgggcttcgtcgatgggcgcgtctaacggccccccatgcgttaaaatccgtttaacatcatgatcaatcagccattccattgctgcagcttgttgatcagccgcaatttcatcgaaagccatatggaaaacaacttgcatcccattggcagcaccaatcaacatttccatcgcttcttcgtcgatttgattgtcaggtgttaggcaaccaaggacgatgccgtcagcgcctaattcttgcgctgaaaagatatcagcttccataatttttaattcttgatcgttataaacaaagttgccgccacgcggacgaatcatgaccatcactggtacatcgtgttcatgcgcataacgcactgattcagccatcacaccccggctaaccgttgtgcctccgacagccaagttgtcgttcaactcaattcgtttagcaccattgcggattgctgccggaattttagtgaaattttcaacacaaacttctttgattaacatggatgaaccctccaaattttaatttaatcctttatgcaaatagcattgcacctaagacaagtaggcccaagataatccggtaccaaccgaagaccttgaaatcatgtttcttgatgtaatccatcaagaatttgattgaaataattgaaacgatgaatgaaaccaacatcccgactaataaaatgattgattgatcgcccgtaaacgtattgccttggtacaagaatttaccaatcttcaagattgccacgccgaccatcgttggaatcgccatgaagaacgagaattccgcacccacaaaccgtgatgtccctaaaataattgcccctaaaatcgtagcgcctgaacgggatgtcccaggaataattgataaggcttggaaacagccaatccaaaaggccgtcaaccaaggtaacgtatttaaatcagcaaatttcggtgtggtatgcttgttgcgattttcgatgacgatgaacaaaaccccgtataaaatcaacatgctggccacaatccagtttttcatcagatgttcatccatccagtcattcaatgggaatccaataatgactgatggaatcaccgccacaattaccttaaaccataacgtccacgtttgtttttgttcgagctggttcttacgtggtgagaaaggattcaatttatggaagtatagaatcacaaccgccataatcgctccaaattgaatcacataattaaacatatcgatgaatgcttttgattcatcaagtttcaaaacactaccgaccaacactaaatggccggttgaactaattggtagccattctgtaaaaccttcgacaatccctaaaatgattgtcttaatcatatttaaagttaacacaatactaatccctccgtaatccataatcgtttattagtatactcattctaaagttagattgcgactcaaattgaaagcttaatcaaattttattcaattcgcccgcaggaaaagccaaatgacgttgatccatcactgcttgaaaatcggctggtagttcgctttgaaccgtgacataccgttcttcaaatggatgatagaacgttaactcgcgacagtgcaatgcttgacgcggtaataaatcatcggccacaccgtataaattatcaccaattaagggatgccccagtgatgcaaaatgaacccgaatctgatgtgtccgacctgttagtaacttcaacttaactaacgtggcatcggtgccatgggcttcttgccaatattccgttaatgagcgtttgccaccaaccccaacgacccgccgcatgtaaaaatcatccgaccgtttgattggccgatcaatccacgcatgttgcggataatctaaccgcatatcaccactggcaatcgcaacatatgttttttgcaattctttagattggagttgcttatccaacaaactatgcgcgaagccgtgcttggtgaacatcatcaaaccacttgtatcgcgatcgaggcgcgttactacgtgcactgcctggctctcagcattttggtcaatcaagtattgtttgacgaaattggccattgtgttgtgcggatggttcggtgccggtaacgacgccacaaacgccggtttatcgaccactaaaaaatggtcgtcttcaaaaaccactttcaagtcccctttaactgggatgacgtgttcgacggccacttccggtgcgaggtaaacagtcaccacatcgttttgaaccagttgggcattggtatgtgcctcctggccgttgacgaggattgtgccacctgcaaatttaattttagttaactgactgcgagaaagcttatgccgccgtaaaaaattccgcaacacacagccttctgcatcttgatattgccattcaaatttcatgttttgacccaataaatgcatcttcgacacggttccagaaatgggtgtgtcgataacgtgcaaactgtattctttcctttgcaattttaaattgcatcgaggcaattggtcgatccttaaatgtgaattgatcaattgtcacaacgtaatcacttgtcttagaaggcttcaggagcaaccattcatccgatggtaacacgattggtgccgatagtgttcgatatacgcgattattaatcgacgcaatttcggtcatctgcatcgcgtctaagcgtggatgtaaaaccgcgccaccaatcgacttactataagctgtcgacccagttggtgtggaaatacagagcccatcgcccctaaaactttcaaaaaaattctctttaatgtaaacgtctgtccgcaaagtcgctgcataccgacgtaacgtcacttcattgagcgccaaactgcgactgatttcgtgcgtatccgcatattcgattttaacttctaataacggatagctaatactctgcccgagatcttcttgcaaggcgacgactagatcatcgacttcaaaatcgcgccagtcagtgtaaaaccctaaatgtcccgtgtgcacgccaataaaccggatgtgcgctaaatcgtgggcgtaccgatgaaaggcagataaaagcgtcccatctccaccaactgaaatgaccacatcgggcgtttgatcatcaatgacaaaccccgtattgatcaatttttgcattaagcgattggcaacttgaacggaagaactaccgtcattgctaaataccgttactttcaatctggcgtctctccttcagaatcattttcagttgccttttcaagtgcgttttgccattttccatatgagaagagttgttgtgcttcttgaatttcttcacgaatttcagacatttctttatctaacataaaggatgcttcggccgctcttttaagccgcgccttcagcgtttcaggaaattccccttgatatttataatttaatgaatgttcaatggttgcccaaaagttcatcgacattgttcgaatctgaatctcggccaaaatcaatttttcaccactgattagttggactggatattcaattacaatatgatatgaccggtaaccacttggtttaacatttgaaacgtaatcccgttcttcaacaattttcatatcagtccgttggtgcaaaaggcccacaatttcatggatatcttccacaaactgacacataatccgcaaaccagcgatatcttgcatatcttgttcgagtaaatcttctgtaatgtagcggcgttgcatcttttctttgatactatcgattggtttaacgcgcccagttacaaattcgatgggtgcatgttcattattttgttggtattgcttgcgcatcccacgtaatttaatttttaattcgctaacggcctgttcataaggcattaaaaacttcttccaattttcgaccattataaacccctcattcactctgtcacatacagcactattttaacatagattagaattgaataaataataatcgtctgaaatacaaatttcattacaagtctgcttttttgtgctaggataataacattgcttttttaaaaaggagctcaaccgatgtcacaaacgattgaacgcgaatttaagacgatgctaacggcggcgcaattttcgcaactaaaagcggactatccatttgcagcgccgtttgtgcaaactaattattacttcgaactgcctaaccagggattggctaaacgtcactgggggttgcgtattcgactctttgacacctatgccgaacagacgctaaaggtgccaaccgtagaaaatgctcatagtctgattgaaatcactgatcgcctaacacttgagcaggctactcacttaattgagcaccaaaccgtattatcgtctggtcagatcgctgtctattttgcagcacaagccgtgattatcaaagaattgttcatctggggacaggcaacaacgcaccgccagaccgcgtctttagttgctggcctgttaacgcttgatgttacccaataccctgacgaaacccaggattatgaagtcgaaattgaagtcaccaacgtccaagaaggggcaacttggtttaaatcatttgtcacccgctatcaattaagtgaacaaataccacccaataaaattatgcgcgcccttatccatcaagcttaaactctgtcaagctaacttattgcataattttaaaattttgttagagtagacagtacaagcgcgtcgagcagtatatacaatatagaaattttggaggaaccaacttgttagaagtgtttttatttatcaacccaatcgggcaactttgtttacgttccgaagaggcacttttaaagattatcggcgaaaccgatgcaaatattcattttaagtttattccagtcttaaacttaaaaaacgtcgagcattacatgcagtttcagcaacaaaatagtcatgatttaaacttacgtaatcacgttttcagcaccatttatgaagcagtactcgcttataaggcagcaacgttccaggggggcaagaagagccaatcatttttaatgcaactgcaacaagcattccgtgaaccagatatggaacttaacaacgaattagtccttacaattgctaaacgcgtaggacttgataccgaaatgttacttgaagattggcacagtccacttactaaacaggcatttgattcagatcaacaattatcttgtgagatgaacattcagatgaccccttcagcagtagtcttcaactattcaaaaggtgaaagcgaatcaggcttattgattgaaaattgcgattcctatgaactcttgaaacaagcctgttgtgctgaaacaacacctgaacagactttccaagcacttcaaaaacaaaaaagcaccctctcacgggttgctttgcatgttatttcttaatcttagaaccggtggtcaaccgacccccggttcttttttaatgcttgtttcaaagctatttgcccccattgtgcaaataaggattgctttagtagtggttgttggagtaagggcgttaccgctaaaaaaagatcaattggttgggcactcaaccaccacgttacccgactttcaaactgactgagctgataaatgggtggtacattacgtgtgcagtaacaccagtccggaacggcttgcaagcgttcatggtgggcataacaatccgcctgtaacgcaacataatgtgcgtcttgcagccctaatcgacggtcaataatttgttgctgcataggctgtgacttgcccttataatgattggctggcagtcttgtttgtgctacaagcaagcgcacaaacgccttagttgtcaatcgcagggtttgccaagcataaccagcaaaatcacgggcgacaatatggtgatataacacccattgcccccactttggcaaataacttaccacataaaagccccactgccgccgatagttgataaaccccaactgttgctggcttaaataatggttagtaaaacaataccgttcaccaaccacccataatacaggtaatcggcgctgctgatagccgattgttcgttggtttaacttatctggcgtcaatgggctgcattggtattcaataattaatggttgctgattccgcgttaaccatacatcagcgcgctgtgtctcgccgacaggtacttcaaaggtagcatgccagcccaacgcatgtgctaattcagcaatcgcctgttttcccgccagatgggctggactctcaccaccaccagatacacgttctgcgatatgtgcgaaatatggtgctttatgcaccccacgatgcaactgaaccagttgttgacaatgtggacagaaataccgcgctacttgctgttgtttggctgcttgatcggcgcgaattaagcacccgttagtggtctgtgcaactttcattatttatcacccccaccgaaaatacgcaaaaaaataacgggttctcctaaatttaggaaaacccgttatttttaatgtttgaagtagtagcgtgttaactcaagcgcactattatccatgactttttcaccgaattcacttaaaaaagctgctgtgtattctgacttctgcccgtattcattagcgaccgctaaatcatcccgtgcaaacgcttcggtcgtattctccataaaaataataatctgtgcatagtactgatgtttgtaaagaaataggttcgacacaccactttcgatgtgtagctgttgtgccaaagcaatccaatcgtcaaatgacttaaacgataacacaatctgtttcattggattgtccgcttgattcatataagcggtcatttcatcctcttcctcagtcgcatcatcttggaccgtatctcgtttcaacagttgttctttaatgtattcagtaataccgtctttgccttgcaccatttctgattgacctttaccaccgtcaaagtttggcatattcttactaatcagtaattctaacccttgatcgttaggcaacacttggaacgttactgcatcgttgttcgcaaatgtgtgttcactgtccacttcttccagaattgaatagaagaaccgctcaatctttttatgattgctcaacaaatcaagtccagtaatcccgcgttcttctaaatcatcattttctaatagaacccgaattgtgttctcgtcgattttttccattctcatgggacaacgcccctttctaacgcgcttcttatagcgtcgtaattcactttctttgacctaccataccagtatctggcgtaacattcaagtatctacatcgcagcaattaattttttaacccatcaaaaaagtcgaggctgttaacagccccgactctcctctagaatcctgctagtaattgtgcttgttgtaattccaatgcccgtacttcacgtggtaagaaacgacgaatttcatcttcgttataaccaacctgaagtcgtttttcatccaaaataattggacgacgtaatagccctgggttcttttgaactaaatctaataattcgttgattgataagtcatcaattttaatgtttaattcttggaaaaccttagaacgcgttgagataatttcttccgtgccatcttcggtcatgcgtaagattgttttaatttcatttttattgagaggctccgaaaagatattgcgttcttggtatggaatattgtgttcctctaaccacgcccgggctttacgacaagatgtacaacttggtgatgtatataacgtaaccatatgtctctctcctttattaacatgacaccttacttaacaataagacaatcattttctctcttacaaattttattatacgcgagtcagcactagaaaactaccctaaaattaaatttattaattattttttaataattaataaatagacatttggacataaaacgtctaattaaaacggtttattattaaattttcccactcaccattaatttttatgtttttacatttatatttatcattcaaaaaaaattatagtagtttctactttctaatgaaaattcacttattttttgtaagtttcatcaacgccgcctatattacacgctccgacatcaattgtcaaatcctgttgggcaactatcacgggtacgtccccaacagtcgcttgtgcttgtgcctgtagcgtttctgccgaaaccccttgtggtaaatgcgttaatagaattttagctgcgccactttcttgtgccaagttaccggattgcgttgttgtcatatgcgccattttaccagtgcgatcttcaagaaaattcgtatcagtcatcagtaaatctgcagactgacaaaaagcagctaattctgggaaatacgccgtatctgcagtaaagaccaagacctgccccgtcgtttgttcttcaattcgaacagcgaatgctgggacaggatgcactgtccgtttgaaagttactttcaacggccccagggtcagctctgtgtcttcttgataaccaaagccctgcgtcacacccggttgtgtcaaactgccaaagtggagtggatcttgcagatgcccgtaaataggtaaaatgggttcctttttggttccttgatgcagttgccaataatattgtaaaacccccacatcagcaatgtgatcgtgatgatagtgcgtgagaaggaccacatctagttgcaatgggtcaaattgtttctcaagcgctaataaagcgccactcccacaatctagcaataaatgatacgccccacttgttaataaataactactagtcccaacaccggcgtatggatatccaccgtaataacctaagactgttaattgcatttttaaatgaccacctttctaatttctatagtagcgcattccgggtatcgcgcgcactatatttactaactaaataaaaaaagaccgccacccaaatggatggcggccctaatgctattgaatgacttggactttcttagctttaacttcttgatagaaaatcgtaacgctcataattaagtatggatagaaccacaagagacctagtccagcagtcatatagacgaccagttcccatccaataaatgataaagtaagcccgagtaatttcagccagttcccttttaaaatcacccatgaaaggctaaagattaatttgagtggtgcttgtggtaaatcaaacttcaacagtactaaaatctgataatacgttaaaatcacgggttgcaacagtgacaaaaccaacatcaccgtcacaaacaataagacagtttcagaaattgtcccctgctggctaatgtttagcaaataaggcgcaacggaatctaatccattaaaagtgaattgaaatacacgatcccaaccgagtaaccgataaaacggcgccaacccaattaatagtaagatccagtttaacacttgttgaacaagattcaataccacaagatgggtatacaacggttgccggaataacaataaggtatcccggtaatagctgggcttattctggctaactttataaacacctaagaaaacagcatttaaaaagataaagtataagaaataattggcaaaggtgttgagcatttgataaccaaatgaactggcgccaaacacgccttcaatcattgagtcgactactatctcaactaacaaccaaagcgcgactaaagcggccattttctgccagtttccttttaataattgacgcgcttttgcgcggtacatagctaattgcaaaaactttccctccgagtttagtagaacacatcactattgagcggtgcattcacaattcgattgtagatattggccgtaattagatagaaaacaaagtaaatgatgataaacaggccgcaaacgatataggctaattgtaacccaggattatctaaaaacaaacccaataaccgaattgcaaagaaggcgtgcatcgatcccaaaataattggcagtaaaaagagcatcaaaatttggaaataaatcgtgcgcttaatctcaccgtcactcatcccaatttttttcaatgttttatactgcaaaatctcttcttgtgcttctgacaattgtttcaacatgatgatactaccagtggctaacatgaagattaacccaataaaaatggcgacatacatataaaatccgaagtttgcgttagcaatatctcggttaggtttttttaaaagcacagaatagcggcttaactcttctagccgttgatcagtggttttaatttcataatgggtttgcccggcttttttgtgcgtcattaaataatcccattgtttgggcttttgagatagacggaataaatcgcgcattaatcgtttttgcttttgttgggcagcggagagctgaactgcatagatttgatcaactgaagttgcttggacttgttgatattcagcatcattggccacaatcacgtttaagttaccatcaaagaagacatcagaaccgtttggaaatagcttacgaatgtgtacaatccgaaaatctgaaagcccagactgttttaattgcaacgggattccagctcttttcggtggcaaacctgcacctgctctgcgaggcatcttcagcattgttaatggcaagttaatgatggtcaccacagtatttttcttcaatttagttgctggtaacttaaattgttgcgccattacttggttgtattgggataacggcatgacaacagctgctccatccattttgatgccttcccgatttaacggtgaattgaccttaaatcgagcatccaccaatttaaacgaagacattgtttgactaaccggctgaacatgatattgcgttaaaattttgtcgaccgctgctttttgactttgtgtataaaccaaatccaccggaatgttctgccgtaatgtatcttgaccgtgcgtataaatcatcgccgcacttccgattgcggtaatagtgactgcacttaaaatcgtaatcatccacaacatctttgcattctttttaaaacgaaaactcaaattcgtaacgtttaacaaatgtgtcccacgataataaagccgtttccagtgccgttctaactgtagccaaatttgcgtataggcctgaaaaaaagccagtgtgccaaaaatttcaagtaataaaatggttagtaaataaaccaaatcaatcccaaaaccatagcgccgctctaagctcggcatcaaaaccagtgtttggtctgccaaataatagccgctgataatcaatacaggtgcaataatcccccataaataagtcagccagttcggtcggcgcactttccgactgactgcagatggttgcagcaatgtcactaattgataccgataaatcatcgtactgtttaaaaaaccagttaataggaacaacccgccaaaggtgaatgtcgtttgttcaatggcccgccatgatattaaaaacggcatggcaaccgcaatccccatcatgcgtaataataacatcgcgaataatttcgaaaaaagaatcccgaataacaacccgataatcagggcaatcacaccgataatcaaactttcaaagaagaagagtaagctaatctgaaatttagtcaccccgatgacacttaaaacaccaatctcccgccgacgccttttaatgaaaaataaattagcatatgccaagaaaaaagcggcaaacagcaaaataattaaacctgctacttggatcatccggccaaaagctaaagattcaccagccatcttgaggtgcctaaagattggcgcagtttgaatcgacgtaaagcagaaataaaccacaatcgcggcaacacaggcaatcacataagccgcatagtcgcgcgcatgattaatcgcatttctaacggttaggtgtaacagcattgaaacggcctcctccacctatggttgcttgcatatcaataatttgattgaagaattgttgccgatcaccattgcgaacgatttccgagaataattgaccatctttaatgaaaagaattcgccgacagtaactagctgtaaaggcatcatgcgtgaccaataaaattgtcgtcttttcctgacgattaatcacggttaaatattgtaaaagctccgtagctgattttgaatctaaacttccagttggttcgtcggccaataacaaagtgggattggtaatcattgcgcgcccacatgccactcgttggcgctgtccaattgaaacttcatccggataacgatccaacaaactactaatgcccaagactcggctaactttatccaaccgtttttcaatcactggcacacttaacttatcaagcgctaatggcagtaacatgttttcgcgaaccgtcagtgaatctagtaagttaaaatcttgaaaaataaagcccaaatcttgccgcctaaaattagcaagcttagcttcccgcatccgactcacaacttgatctttaattaacacttgaccatgcgtcggccgatcaatggtcgcaatcatatttaataaggtcgttttcccagcgcctgaagggcccataataccgacaaactcccacggttcaatatcaaatgaaatattattaagcgcattgaccagactaaaccgatgcccgtagactttcgaaacttgttggactgatacgactgccattttttcacatcccttaactaattggtattcattttagcagagttgaccgcaaaagcccattttataactacgaccttagttggttgtcttttctagtgaaagtggttaatattagtctatctatgtatgaggagaattcattatgtttgaaattatgattgttgaagacgatccaacgattgccaacttaatcgctgagaacttaaataagtggcaattacacgcaaatattacgaccgatttcgataccattttcgaccaatttttaaccaataaaccccatctgattttactcgatatcaacctgcccgtttatgacgggttctactggtgtcgcaaaattcgtgaagtatctaaagtccccataattttcatttctagtcgcagtaccaacatggacatggtgatgtcgatgaacatgggcggcgatgacttcgtcaataaacctttttcgatggaagttttaattgccaaaattaacgccctcttacgacggacttacaactacgtcgaccaaaatgccgatatcatcgaacataacggcctaatgattaacctccaaagcggcggagctcaggtgggtgagactaccattgatctttccaaaaacgaatataagctcctccaatttctgatgcgtcaacacggccagattgtcagtcgcgaaaagttattgcgtgccctctgggacgatgaacggtttgtcgacgacaacacactaaccgttaacatcaatcggcttcgcaaaaaaattgaaagtgctggtttagaagactacattcagacgaaaattggccaaggctatatcatcccctaaggagttattatgacgtttaaaaaattcttacgtgatcatttatttcatatcgcttttttcttcagcggtatgattgttctggatatcgtcctatggctcgaccctagtatgcgctttgctaaggcgacacttttatacctcgatttattgctggcgctttttttctgcgcctttttggttggcttatacgtctaccatctcaagtggtaccgcacaatccaaacacgcttagatgctaaagaagatagcctcaactggccacttacaggcgctacctcggctgaaaaacaattcattcaacactacgtgaatcaactgctagcctatcatcaacaaagcattgaccgactaatctcagcgcaacaagatcaaaagaatttcattgatggctgggtgcacgaaagtaaggtccccctagcagctactcaattgctcattgaatccatcgaagaccagattccagaagacaaattcaatcaattaaccgatgaactgatccaaattgaacactacgttgaacaagtgctctactactcgcgtctcgatagtttttctaaggattacttggtgcaggaatacgatttgaaacctttagtcaaccaaatcatccgccaaaatcgcaattattttattcaaaaacacatccaatttaaactgcttggtgccgatcaaaccgtcttaaccgatgctaaatggctggcttttattttgaatcaaatcatttccaatgcgttaaaatataccccagatggcgcacaaattacggttcagattgaacgtgacgaacaaggcgtttggttaagtgtcatcgatacagggattgggattccggctgaagacctaccccggatttttgataaagggttcaccggtcaaaatgggcgctattctaaccaacgttcaaccggtttagggctctaccttgcacgtgccttaagtgaaaagctcggtcacgaactcaccgttagctcccaacaaggcagtggttccacttttaaactactctttccttttttaagttactacaacacggatgacgatgacggcttattcggcaaaacccatcctgcagacaaatgaaacggagcttcaaaatgcgtaaaacacttttaatcactacccttttaacaataacactcctagcaggttgccaagctaaaaaaccggcttcatcaaccacatcccgcgcgcagccaactatgacgacctacgccaaccggacaacaactaaaaaagccctcgcggccgattcacagacttggttgtttaacaaacaactcctttctaagcaaactaaaaacggtctttctgatgacatcactgtttcaaatattgctcaaatgaccactcctaaaagttggctgacctctaaaggcaccttcacaagtcagccgattaattatcaacaaatttcgtttaaaaaatggcaacaagatagccgcagtcatctgatgaagagctatcaaaagacactccatctgatgactgtggcacaagtcaacgctgcattacacaaattgggggctgactttaagattaaacacctctcagatctcgtctttcttgagactaagactgggaaaaatacaattgaccagggattcgttgccaaaggaaatcgcctatacgcaattacagctcattacagagatctacaaacccccaccaattttgaccgcggacagttattcgtcagtcaaaaagcaaccgccaaaacaacagccagtcctgttgccctcgaccaactcaatggcacttggattgcggccgcaacaacgacgagtgctaatgacaccggaaaactgatggtcaaagatggcttcatgtaccaaaaacgttataatagtattgaacgctctgccattcaagatcttgccaaatacactttagtaacgctcaatcaaaatacaatctatgctgctcaaaaaagggatgcagcacaagctggttatcaattaacccctaagtcgattgctagtggtgatagtatcggttatctctacctcttcatgaatgatcatgaactgctacgcatcggtgctggtcaagcaacaagctatcaaaagacggactcactagtagctgctgccgatttatcacagactgatcaaaccatttttgagcaacttgatcaacaaaagcctggtgaatcagcttcaaccattacggtcaaagcaggtcccgctgttgtcgggatgagtgatagtatcaactatctaaccgatgcaaccgctggccagatttcgaacaatatcgtcattggtaacgttcaaaacgggcacgtcaccattgcaagtgagtcaactcattaattataggcacaaaaaaaaggtccgacattcatgtcggacctttttttgtgcttaagccgcttgatcgcgggctgcttcttcttttaaagccatgtctgtggcgatcttgatgaatggtaggtaaatgagcactgaaacaagtaagttcactgctgctaataccccaccttgccaactaaccgttgcgatgaccccaccgataattggtggtgttacccaaggtggcataaccgttgcagcgggcactaacccggtgctagttgcaaagtatgcaattgtaacgatcaccattggtgtggcaatatatgggatgaataaaattgggttcaatacgattgcaagccaaatgttaatggttcgttaatattgaagaccccaggagcggcactcaaattcccaacgattgaatattgtttattctttcgacccactaaccagattgcaatgattaagcctaaagtagcaccagtcccacctaagttaacaaatgaatcaaagaatggtttgttaacaatatatggtgctgctttaccagctttaatcgcatttaagttagctgtaattgcaggtggtaccccatcaggcatcttaatgactaagtgtttattacccaataaacgtctgagaatttctgttgaaatcatcgcaacgattaaagcaacgaacaagcccattgagtccatccctgcaagaccgccaacagcaaagaatgaccctaatgctgttacgccggctgctagtggattgatattatatgacttacctaaattgtaagcaactaggaagacgataaacacagaaagaatcgcaaatgtcccgctccaagcattgcccccgaatttagtccagatataagccttttcagcgcccttaccaactgtctttgagaacacactgttcatgaaattggtatatgccggaattggtaaattgttaatcaaggttgcaaaagcacccaagatcatcaatggcatcgttgttacgaaggcgtcacgaatggcaaatgtcgttgattcccaacttttgccgcaactggtaaaaagcgtttctccatgaaactgataaatgaatccattaacctcactccttttcctgaatcataattaaaaaataattgctattacaagtattatgttacagaaagcgttgtcaaacgataaccccgttcattacctatgaatgtccagtttttcacaaaaactaaaaaaagcgccaacccattctaatcatggattgacgctcttttttatccgtgttaggtatataccaatgacggaaaataaaaattaaatttttaataactttattttacatattactttcaatgaacaagctttgcccatataacgggctttttagcggctaatgattttttgacatcgataatccgttgattggcactccctctgaactgcaatgtcagatccatttggtccttcatgaagcgcccatcaactaagatatcaatcttagacagcaactcgagtttatcatctgattcttgcatcagttcttcccacgtatatcccgtccatgaccagacgtcctttgtctgcccataagtggcgcgaattcggtctactagcgataaacaagtcttggtattcaagaacggttcgccacctaataacgtcagtccttggacataagattgccctaaatcagcaataatttggtcttctaattcagttgtataagggcggccatagcgaaaattctgcgccactcgattgtaacaaccggggcaagcaaacatgcaaccactcacatataggctacagcgcaccccttcgccatcaacaaagttaaacggtttataatctgcaatataatcctggcttagtgtttcagaaagccattctttgggcgccggattcttcgggccttgttgttttactgccatcttcaaaaactccttcaaatcccgtattcacaattactgccgtgcaacgttgttattatcgttgccaatggtaatatgcatgtgcttaactcgactggcgatttccttatgccgaccatgcaccattggacgttgttgtggattacctagataaccacaagtccgcttaacgacgtcacatgtagcagcatccgtgttcccacattgtgggcattggaacccgcgttctgtcggcttaaagtcccctttaaacccacatttgaagcattgatcaattggcgtattcgtgcctaagtagccgacacgatcgtaagcataatcccagacagcttctaaagcctttggattttgacgcagatttgggtattcacagtaatgaatgaacccaccagaacagtattttggataatctttttcaaaatctaatttttcaaatggggttggtgccttacgcacatcgtagtggaaactatttgtgtagtattctttgtctgtaatattttcgacaatgccaaatttttgcgtatctttttgacagaacgtatttgttaaactttctgctggtgtgctgtaaacagagaagtgatagccgtattccttttcccaatcaacgcagtgattatagaggtctttaacgacgtctaccgtaaaggcttttgccttggcatccttttcccagtctggcccaaagaaggctgtaccgacttcataaaggccaatatagcccaatgaaacagttgcgcgtgaatttttaaagacttcatcaacactatcggttttcttcaaacgcttgccaaaggcaccatattcataaagaatcggcgcattttctggcttcgcttctttagcgcgttccactttaaagaccagggcttccttgcagacttgcaaccgttgttctagaatttcccagaacttagcttggttgccatcagcttcaagtgcaatccgtggtaaattgattgtcaccacgccgagattcatccggccactattcacttcttcaccatgttcgtttttccagccttgtaagaagcttcgacaacccattggtgctttgaaagaacccgttaattccaccaacttgtcatacattaaaacatcgggatacatccgttttgtggcacattcaacagctaattgtttgatgtcataatttggatcagttggatttaagtttaagccgcgttttactgcaaaaactaatttagggaagatggcagtccgtttttctttacctaatccttcaattcgaattgaaagaattgctttttgaatcgcacgttcaatccagttactgcctaatccaaaaccaagcgttgtaaatggtgtttggccttgggatgaatataaagtattgatttcatattccaacgcttgcatggcgtcataaatatctttttcagtcttggtttgcgcataatccttttgttttgcttcgccatcaatccaattcttggcatctgctaaatgtttggcataattcttttcggcaaatggtgccaataattcatccacccgatcagcggaacaaccaccatattgactagaagcaacgttagcaataatttgtgacatttgtgccgtagcagtttgaatcgaatgtggcgcttcaacttcggcattcccaatcttaaagccatgattcaacatttctttaaaatcgattaaacaacaattggtcattggactatatggttggtaatccaaatcgtgccaatgaatctcgccttttaaatgggcgttcgccactttatcaggcaacatcttaagccccatcgctttagcaactgtccctgccgttaggtcccgctgtgtattaaaaacatgactatctttattcgcattttcattgaccacagtttggtcttttttcaataatttttgaatggtaaagttgatatcagttgccttattccgggcaaagtcccgttgcgtccggtagttaatgtattcttgggcaatatcatattggtgatgttctaaaagtttatgttccacaatattttgcagttcatagattttaacatctttatcaaatcggctgccgacttcactcacaacatctagtgcgactgtgtttaacacttgatagtctaatggctctaattccgtcttcacatttttagcggctttaataattgcttgttcgattttatccgcagaaaaaggcatgattcgcccatctcttttaatcactttaatttgcaagtctgcttctgaagcaattttcatatccatcttagcaccagtctccttttgaatcagtaaccccatcatagcggattaaaaattcggattcaacctatatatagtagataaaccaacaaaaagacgcactacaactatatgttgtgtgcgtctaattgtgtgcgatattttctttcgcccgtccttatcgaaatctacttcatactgcttaaaaaaagattgacatcatgcatctcgttttaatttcaaagtcattgcattaatagccacaacaattgttgagagtgacattaagattgcaccaactgctggacttaatactaacccaattccggcaaatagccccccagctaatggaatcgctaaaatattataaccagcgccccaccagagattttgcgtcattttgcggttagttgcgtgcgataaattcaagaaatgcataatatcgtttggattactcttcacgaggatcacatctgctgaatcgattgcaacatccgtcccagcaccaattgcgattccgatatcagcccgcgttaaacctggtgcatcattaacaccatccccaaccatcaggacgacttcgcctttagcttggtaatctttgacgattgcttctttatcttctggtttcaagttcgcttgaaccgtcataccgcccaattgtgcagccactttttcggcaacttgttgattatcaccggttaacatgaccggttggatatgccgtttctttaatgcttggatgaaagctggcgcttctggtttaatctgatcaccttgtgcgactagtcctaaaaccgtttgatcttgtaatagataactgatggaattccctttttctgctaaagtttggaaaagagcttgatcaaatttaatatgctgggcttgtaaataagttgccgtcactatttgataactttgccctgcaaccgttccagacaaaccgacgccttgaatcgtttgaacattgtctgcctgtaaatcaggaatagtttgtgcttggttatactctagaatcccagtggccaatggatgacttgaatggcgttctaacgcaccaaagagttgcatgagtcgttgttcatcaagtgctgtatcgaaaacttcgacagcattcactttgaatgcgccttgtgtcaaagtccccgtcttatccatcaaaacaacggtaaccttatctgacaattcgattgcttcacggttacgaatgagcaagccgtttgtagccgcaatcgctgtacttctggcaaccaccaatggaatggccaatccaagtgcatgcggacaagcaataataaagacggttaccatccgttcaaaagccgtattcagatcggccaagaacacccaactaatgaaggcgataatcccagcaaccaatgcagcatagaaaagatacttcgcaactttatctgctaacccttcaacttttgatttttcttgttgtgcttgtttaattaatttcatgacttgcgctaagtaaccactttcgccagtcccggtcacttgcacggttaacgtcccatttccgttgactgtcccaccgattacttgatcgccttcagccttcgcaacagcctttgattcacctgtcactaaggattcattgacttggctttgaccggcgataattaacccatccgcgggtactttttcaccagctgcgactaatacagtttgtccttttttcaagtcctttaaatcaaccgcgtgttgatgccctgcttgatcaattacttgtgcttggccgggtaacaaagcagccattttttctaaagcactccctgcactcattaccgcattcatttcaatccagtgtcccaacaacataataacgattaacgttgcaagctcccagaaaaagtccatcacgtggccttgtgggttcaagaaatggttcgcaacaaaggcgtataaactatatagataagaaacactgatccccattgcaattaaggtcatcatcgctgggctcttagcagataattctccttgagcgccctttaaaaacggtgccccaccgtaaaagaagagaaatgttgctaaaatcaatactagccaatctgaacctgggaaagtcgtttgaaaaggtaactgcatgcccataaatggtgagagaattagaattggtaccgttgcaattaatgaaatccagaatttttgttttagatttcccatgtgcatcatatgaccaccatgcatcatcatatcgccgtcgcccatgtcatggtgcatcccatgcatatcgtgattcatatgccccatatcatgatccatcatctcatggtcatgatgcatgtcgtgcatgctgtgatccatttggtgctcgtgatgcatctctttcatatcgtgtccttcatgttcatggtgcatttcatcgtgtttcattttacttcctcctctatgcaatcacaattggctggtaaacaatcacattcaatcattgttggtgcactaggtaatttagccgctaacaccgtttgtaacgtctgaatatcattttgactgagcgttgtttgctcaattaaagtggctaatgtgcagccttttttcatcccacataattggttaaacagcgactgcgtggcatggttcatcgcttcatcttctgcgatattggccgtatatataaatcggcgtccttctttagtggcaattagatagtctttttttaccaaccgacctagcaaagtcttaacagtcgacgcttgccaatcgcgcttttgctgaacgagttcaattaaatgactgctgttgacttgcccaagtgaccaaaccatccgcataatttcccattccgcatccgtaataacccctattttttcagtcattcgcggttttctcccttcgtttacatttgtaatcattagttacagtttacatttgtaatcgataactgtcaatcttttttgctcatccaaattttacgcacaaaaaaagaccgccacagtgggcgatcttttaccatttaattaaagattttgcataaaatcttcaactaatttttggttttcttcattacttatattcacattaacagcggtttcaactaaatcagttaattgagttgtatctaaacgtttcatcaagctccgaacccgaaggaccgaagttgcgctcattgaaaattcatctaagcccattccaacaaggagtggtgccatgactgaatcgccagcggcttccccacacattccagtccacttaccttctttatgagaagcgtcaataacgttcttaattaaacgtaagattgctggattgtatggttgataaaggtatgatacacgttcattcatccgatcagcagccattgtgtattgaatcaagtcgtttgttccgatactaaagaagtcaacttccttagcgaattgatttgccaagacggcgctggctggaatttcaaccatcatcccaacttgtaaatcatcagaaacagtttgaccatcagcaattaatttagctttttcttcttcaagaatgccttttgcttgacggaattctgcgacagttgcgatcattgggaacatgatacgtaacttaccgtagtttgaagcacggagtaaagcacgcaattgtgttctgaaaatatcatcacgatctaaactaatccgcacagcacggtagcctaagaatggattcatttcttcgggtaatggcaagtaaggtaatttcttatccccaccaatgtccattgtccgcacaacaactggtttaccagccataccttccaaaacagtcttataagcttcgaactgatcatcttcactaggtaattcagatgagtccatgtataagaattctgtccggtataagccgattgcttcagcaccgttatcgataacaccatctaaatctttaggtgtcccgatatttgcagcaactgtgaatgtttttccgtcttttgtaacggatttttcattctttaacttttcccattctgctttttgatcagcgaaagcttgcgccttcttatcgtattcagcaatgtctgcatctgtaggattgataataacatccccgttaatcccgtcgacaattaattgttcgccggctttaacagaagttgtgatattttcagtcccaacaattgcaggaatttctaaagaacgagccataatagcagagtgagaagtccgaccaccaatatcagtcacaaaagccttaacgaatttaccgtttaattgggctgtgtcacttggtgtcaagtcatgagcaatcacaattacttcttcatcaattaacgctgggttagggagtgttacccctaataaatgactgagaactcgcttagtaacatccttgatgtcagcagcgcgttcttgcatgtatgcgttatcagtcatagcctcaaaagtggccacgaataaatccgcgatctctttgagcgcttgctcagcattaaccttgtcatcattgattttaccttcgatagcgccggtaaattctgggtctgctaaaatcatcatgtgggcatcaaaaacttgtgcttcttcttcccctaatgatccagcagcaatcttccgaatggtctctagatcactcgtggaagcttgtaaggcattatgcaaacgattaatctctttttctgaatctgaaatagttgatttcgaaaatgacaaatcgggttgcactaacatataggctttcgccgtagcgataccatcactggcagcaatccctcttagttttgtcattattcagataaaccttcctttttcattgtttcttcaattgcgttgattgcgtctgcttcgtcagcaccttcagctgagatagtaacgtcagcaccttggccaacaccgagtgacataacacccatgattgacttcaagtttacagatttacctttgtattctaagttaacatctgagttaaatttgcttgctgtttgtactaataatgtagctggacgtgcgtggatacctgtgtctgctactacgtgaaaatcgcgtttttccatattaatcgatccccttttatctaattatagatttagtttttaacgaaatgagtggtcactagtagtggctacccttccgatatttaagattaccattttttttaaaatactacaatagtttcgctaacaaaattagtagccgtctacactataccgctttcagacttgcggtagattaccgcaccatttcgttgtgcttcgcccacaatttcttttcgatggtcatagttgacccatactttctgaaaatctaaaaattcggactgagcaacctcaatctcagtttgttcgttatttattaaggcatccatctctgctaaaaaatcacgcatctgccattctgcctcctttgcaattcttttatcgtggcttgaaaaattcgttttcattccatctgcgaaataaaacgatgacctcatactaccgcataccgcccatacctgacaagaaacttttattttcgagttgcctgacttgcaactttttttagagatgattataatttggataaaggtcaaagatagtcaagaacactttgacgattctattattaatgaaaggttgtgacagattaatgctttgtcaaaactgccagaagaatcctgcaacgattcatctctatacaagcaccaatggtcaacgacaagaaatcgatctttgtcaaaactgttaccaactcttgaaacaacaaaacagtaatggccaagcaccacaagggcaatatgcagatccatttggctttggaagcctgaatagtttcttccgagcaatgggcgcaactcccgatgatcaattacaagcaaaccaagggccacaaacccaaagtggcggccaaggtggcggcaacaacgggcaaaacggcgaaagtctgctcagtcaatacggtgtaaacctaaccaacttagctaaagctggccaaattgatccagtgatcggtcgcgatgctgaaatcgatcgtgttattgaaattctaaaccgtcgaacaaaaaacaatcccgtattaatcggtgaagctggggtcggtaaaaccgccgttgtcgaaggcttagctcaaaaaattgccgacgatgacgttcctgccaaacttaaggataaacaagtcattcgcttagatgttgtttcacttgttcaagggaccggtattcgtggtcaattcgaacaacggatgcaacaactgatgactgaattgaagcagaataagcaatacattctcttcattgatgaaattcatgaaattgtgggcgccggtaatgccgaaggtggcatggacgccggtaacgtgttaaaacccgccctcgcccgtggtgaactccaactagtaggggccacaacgaataatgaattccgacaaattgaaaaagacgcggccctcgcccgtcgtctccaacccgtttcagtcaatgaaccttctgttgacgaaacagtccaaattctaaaaggactccaagataaatacgaagcctatcaccaagtccactacacagacgaggcacttaaggcggctgcaaccctttctaatcgttatatccaggatcgtttcttaccagataaggccatcgacttacttgatgaaaccggctctaagaagaacttgacgattaccgttgtcgatccaaaagaaatcgaaaagaaattacaaaatgcggaagctgaaaagcaaagtgcgttaaaggacgaggattacgaaaaggccgcttattaccgcgatcaagtcacaaaattgaccaagatgcgcgaaacaagtgccattgaccaatctgaaatgccaaccgtcaccgacaaagatatggaaaaaatcgttgaagaaaaaacccacattccagttggtgagttaaaggcacaagaacaagcacagttgaagaaccttgctgaaaatcttgaagcgcacgtaattggtcaagattcagcagtcgataaggttgcccgttccattcgtcgcaaccgaattggtttcaacaaatccggtcgaccaatcggttctttcctattcgttggaccaaccggggtcgggaaaactgaattagcaaaacaaatcgccaaagaacttttcggtagcacagatgctatgattcgttttgatatgagcgaatatatggagaaattcagtgtgtcaaaattgattggatcacctcctggctatgttggctatgaagaagcgggtcaattaaccgaacaagttcggcgcaacccatacagcttgatcttactggatgaagttgaaaaagcacatccagacgtcatgcatatgttcctacaaatcttagacgatggtcgtctgacggattcacaaggacggacggtcagcttcaaagacaccatcatcatcatgacttcaaatgccggccaaactgatgccgaagccaatgttggtttcggggcaaccctttctggtcagacacactcgattttaaaccaactacaaaactactttaaacctgaatttttaaaccggtttgatgatatcatcgagttccaaccattaagcaaagaaaatctcttgaagattgtcagtctgatgctcgatcaaacaaatgcgatgattgctgaccaagggttaaacattgccgtaactgaaccagtcaaatcacggcttgtcgatcttggttacaatccagagatgggtgcgcgtccattacgacgtgttattcaagaacaaattgaagatcgcgtggctgactattatctcgatcacccagaacataaacaattgacggctcggttggtggaagatcagattcaaatcaccgatgctaaagattcacaggtcacagattaaaaggctttattatctcaagttaaaacgaattacgtgccaaatgaagcgttttcagttatactagtggtaagacttaaacatccagggagtgatttagatgcgcttaatcaatgtaaccaattcttataagcgacttgtttcacaacaactcgctgcaacagccgcaacctacgttaaggtttattcacttggtaaaacaacggttcttgactcgcgttcatcgaaggaacgtgagctccttttaaaaaatgatcatcgacatgtccaacaagccgagatcgattttgtattgaaggaactcgccggtttagattccacagatggccttgaagtcttgaatgatggtccattagtcgaaattacaattccaacaccttcaaaaacagtgagttaatcattcgaaccgccccgacatttcattttgttggggcggttttttacataggcaaaataatggcaattgaataggtcgtaccgtataataactttcaacctaatttaggaggattaatgacgcgatgaagacttttcaaaaagagcaccaaattatttgccggttagaagtgggcgacgaaatcctaacagaacttaaatatttggccgcaaccttccccaaccaactgggaactatcacggggattggtgcctgtgatgaagttaccgtcagcgtttattcaccagaaacggatcaatatattgccacttccagtcaagagcaagtagaactgctggcccttagtgggaatgtcgaaaatgcaaatggcacgattgatgtccatctacatgcaagctttgcccgtttagatacaagcgtttttggtgggcatctagaacgcgccgtcatttcacgtacaggagaattaatcgtttccttaattcccgtttccatcggccgcgtcacccatactgcaactaaattacaagtattagatatttaaacgattagaatcactgctatttttgcaggggttcttttttatgcccacttgacgcgttaattatcaaccacactttttgtaatttatgatagactagtagtaataagtaatgcgctacaaggagtccgtatgaatctgattaacctgcttcaatcgttattgaaatggcgcccgaaaaaagcagctcctctaccgaacagtcatgtacgccaaactgtctctgagcaagagcccatccgtcaagcgcctcaatcgtcacagaaacagccggtcgttcccgttagtcaggacgcaacgccactgctggctacgatgtccacacaaccgcgccatagcacagttaccattcactacctcgatcatcatcgggtccctttacgaccaacgatgaccctgacaggtgaagtgggtaccgtgctcaatttgccatggctaaaatttgccggttattacttggcagctattaccaatttaaaacaacagtttcctgaagaaaacaccactatctggcttttttataaaccgcaactcgcagcaccagtaatggtgttacaccagaatttagaaggtggcttgttgattaagccccaatttttatcaggtgctttgaacgaacactatcaagccaatccactagaaggtggtgctaacttcgtgcaccacacctcagctaatcagactggtcgctttacaactaagacacagtttgtccattttaaatatgatccgctgaatttaaaacacagcgatgcacctgaacagcccttcatcgaacttcttgagccaacggatacctatcagcaaccaagtgaagaagcgctgactgctgctcgcttgccaaagcacgcggtttggaagatttatagctgtgcaactgctccatctggcaaacaatggttcaatcttggcagttcttggattacccctacgcgttatcaattacatgccactaatcctaaaggcagtgatgaatcataccaagtaccaaagttcacctaccattacgcagttatcgaaacaacccctctaaacctcagtgcaagtctgaacaacaataccgtaacattttggcaagcaccgtatgaccaacccacaacatatcagatagtgcctaaaacacgggtagtcgttaagcaagtcgttgtactcgataatcaaagtcgctggtgtcaacttaaaacaggtcaatggttaatggaaggcctcctaacttttgactaaatacccccctaaaaaaaataagccgccgattcagacaacagttagtgtgtctgaatcggcggcttatttttgtttgactctttatattatagttttgcggttaattcaacgtctggatacttatcttggaaccaacgttctgcaaattgattttcaaataagaacaatggttcgtcatgaatatcttttaccaatagatttcgtgaggatgacatccgttcatccaattgttctggattgatccaccgcgcagttcttgaaccgattggatccatcaatacttcagaattatattcgtgttgcatccgatattggaacacttcaaattgtaattgaccaacggcgcctaagatataatcgccagttgtgtaagtcttatacaactgaatcgccccttcttgaaccaactgttgaatccctttatggaaggacttttgtttcatcacgttcttggcagtgacgcgcatgaataattcaggggtaaattgagggagtttctcaaatgaaacagcctctttacccgtgtgaatcgtatccccaatttggaaattcccggtatcatataatccaacaatatcgccagcaacagcgcttgtcacttgttcccgtgtgtcggccatgaattcagttgaattgttcaaccgcatcttcttgcctgttcgcgtcaatgtgacatcaattccgcgttggaattcacccgaacaaattcgtacgaacgcaatccggtcacgatgagctggattcatattggcttgaatcttgaagatgaaccctgagaaatcaggagaggttggttcaaccaacgtttcttcttgtgttttgtgtgcttctggggcaggcgctaagttaacgaatgattctaagaacgtcttaaccccaaagttagtcaaagcagagccaaagaagattggtgtttgttcacccgttgcaatcttatcagcatcataggcattgcctgcttcaccgatcaattcgatatcatcaagggcttgtgtgtaaacagaatcttctttcaatggattatcaccggcaatccgacctgcttcatcaagggccaaataagggttggcttcgtcttctggtcgataaagttcgattcgacggttggcgatatcataaaggccacggaggtcttttcccatcccgattggccagttcatagcacagccttcgatgtccaatagttcttccaattcagcaatcaaatcaagtggttcacgaccatcgcgatccaacttattcatgaaggtgaaaatcggaatcccccgcattttgcagactttgaataatttcttggtctgtggttcaatccctttagcagaatcaatgaccatgaccgccgcatcaacagccatcaaagtccgatacgtatcttctgagaaatcttcatgtcccggtgtatccaaaatattaatccgcttgtcgtcataatcaaattgcatcacagaactggtaacggaaatcccacgttgcttttcaatttccatccaatcggacttggcaaattggccactctttttccctttaactgttccggcttgacgaatcacgcccccgaaaagtaagagttgttccgtaatcgttgttttaccagcatccggatgagaaataattgcaaaagtacgacgacgatcaaccgccgtttttaattcagtaggtgtcattataaaatcctttccgttattccaatataatgcgcttgggacaaagaattgcgcaaccattgcgtcaccctttgtcccattgattgtgctcatttaatttagtcgacttcttctggtgcatcggtctctggttctggtaacgttaattgtaaatcaatcaaccgtgaaccggaaaccgaccccgtcgttaatctcatgccacctggcagctcaattgtttccggatgaccactgactggaatggcaccaatttcagtaatcacgaacccggcaattgtatccacatcagtgacttgaatatctgtattgaaggcactgttaaattcattgattggcatacttcccataacggtgtaatgctgcgcatcaattttttggtacaattcttcagctttatcagattcatcatcgatttcaccaacaatttcttccaataaatcttcaatcgtggctaagccaacaacgccaccgtattcatccaacagaattgccatttgttgctgtgtgcgtttcatttcaaataataaatcatcaattgtaatcgtttcgggaacaaaaagaggttctttcattaccgcttcgatttgcatagcctgaaaacctttttggcgtgcttctttcaagagattcttgatatgcacgacccccaccacttgatccttatcatcccgataaaccggaatgcgggagaatggttgggctaagatggcatcgatgttttgatcgttgtctgcacaaatatcaatcataaatgcatcagttcgcggtaccatgacttcgcgcgccatcttcttattgagggtaataatcccctctaacatttcgtattcatcggtttccagaacaccggcactcttcccagattcaatcatgtggaccatttcttctcgggtgagcttcggttctgtttctgaaaaatcaattggtgtcaacttcattaagagcgaggtcgacattgatagcaaccacacgaatggtcgcagtaagatgccgacgatccgcacgggttgcaccgttattttagcaattgcttctgcacgatgcagtgcaacttgcttaggatataattccccaaaaactagggatacataggataagacaatcgtcacaattaatacggccgcttcctttgtccaagccgcatttcctaaaaggggtgctaatctacccgcaatggttgtggcagcactcgctgaagataagaagcccgcaaacgtaatcgcaacttgaattgttgctaaaaactgattggaatgacctaagacttgaactaatactcgcgccttcttgtcacctttattggcttgctcctccatcttcacacgacttagtgacacaagtgcaatttctgccgcagcaaaaaaagcattcactaaggtcaaaattaatatcaacagtaactgtccccacaccgaacttccagggtcaggattcatcgtcacatccactacctttcattatctaaataagtacatttagccgaatatggcctaccttgcagtatagcatagtcaaaaatggaaattcaacctgcatcttttaaaggtcggtcccttttttagctttagtccgtaacgcttgaatatcatataaataagtaatcactgtcttggtaacagcataaaacggaatcgctaaaatcatgcctaaaatcccataaatattcccagcgaccaataagataatgatgatggttagcggatgaatatctaatgaacggccaatcacgttaggataaatcaagttcccatcgatttgttgaacaacaatgacgacaacaatcaccatgattgttttgggaatcgaaattgataaactgataatcaacgcgggcgcaatcccaatataaggccctaagtatggaattacgttagaaacgccagcaataaatcctaacaaataagcgtatggcatcccgataatgagataaccgataaatgtaaagacgccaacgaataaacactctagagcttgaccaccgatataagctgaaatcgtcgcccccattttccgaagcaagtccgccacttggtcgttataacgatcaggtaacatcttttgaatattaggcactaaacggtgtccgtcttttaacatatagaacaacataattggaatcgtgaagacactaactgtaacgctcgtaatcgcaccaatcatactaccaaaactagatgtgaaactcttcataactttttcagcaatcttcgatggttttaaatctaactgattgacgtatttattgaagtcaatgtttttcaaacgcggattgctagataaatcatccgctactttttgcagtcgatgagcaaaatctggtaggttcgtcacaagctgtgtgatttgtttaatcaagttaggaatcacagtggctacaatgaaaattaaaccgccaaaaaagacgatgaagataatcgtaatcgcccagttgcgtgatattttgagtttacctaacagattgattagcgggttaaacaggtaaaataatagtcccgcgccaataattggcccaaataaagttgaaataaaggtgccaattggatcaaataagaaactaattttggtgcaaacaaagattaacacagccaaaatcaaaagctcaattgaccaaaataatagttttgattggcgtaaacgatcaaacatgcagtatccccccagtgtgcctatgtcacacaaaacgcattttatgctatcatagtgtaacgattattgttattgtaccaaattttatagtgatacacattgattattccttttgaagaggtggttttttaatgttagtgaaacaaactcgtgatttaaaaagtacggtttatcaagatagtttggcaattcggcaagccgtattcattgttgaacaacacgtgcctcctgaacttgagattgatgaattcgaagaccaagcgatttattttgtcggctacgttgctgatcaagccgttgtgacgttgcggctcatcgaagcggactcagattatcatgttcaacgtgtcgcagttagccgttcagcacggcatcatggttatggtcaagaactgatgcgtgccgctgaagtttttgctcgggaatcaggcaaagcaacgctcactttaaatgctcaattaagtgcagtaccgttctatacgcagcttaattttcaagcaaccgccaaaccacagttcctagatgccgggattatgcatcaagaaatggttaaaaaattaactgactaattgtcatttcaccactaaatgacttataatgaacacagcttaataacagaaaggacgttaccatgcctaagcaaaaatcacttcttgtccacttatttttcttcattatcccttatctactcgtcattacgattgccgcaacggcttacgacagtcttgtgattcacagtgccacttgggatcgcaccttgttcagtgctctaatcagcagcaccctaatgttatttattaaagttccaatcgaacgaccgttgacgattatggctgacttagcccctaaccaaacacttaaaatggtaacaagtttcttcctagtagaacgttcacttggtattaagattgctaacttcatttttgatggcattcttttctgccttgcaacctatctgttacgccacttcttgccactcaacatcattgctggtagtttactcggctggtgcgtcttcgcgcttttgctatccatcagcatcggtgctggcatcggctttaaaacattaacgattcaacaagatacttcagtcgaaaacgattaacccatacaaaaaagccccagtcaatcaatgactggggcttttttgcttgagactaaatagtgttctaacgacggtgcgccaattcttgataccggttataccaaatatcaatgtattccttcgaaaagggccctttgccattgttgatccaatcaaccaaaaccttaacgttggcttttaaaatccgatcagtttcggcggaataatgccattgcgcactgtgcgcttcatattcatcgacatctagaagccgtttttcgccattggggaaaaccttcacatctaaatcataatcgatatacttaagcgcctcttgatccatgacatgcggcgatgccaaattacaataataagaaacgccgccctcacgaatcattgccaccacgttaaaccaatacttcttatggaaataaataagtgccggctcccgcgtgacccactttctgccgtctgactctgtaactaaggtatgatcgttacaaccaatgactgcgttctcgctggttttcaaaaccatcgtatcgcgccaagtgcggtgtaaactcccatcgtgtttataactttgaatcgctatatagtcgccttctttgggaatactcatcgacatacccagctttccaaggttattattcataatcacctatcattatagcaaagactcgcaaatttacctaaaactttctaccattaattggttgccaaacgtgccgctaacttcttttgcacagtcggtaatgcaacgtcagctaattgtgcctcggtataccattggcctgggaaaaaggcgaggtcggcatctgctgcaagttgtgcttctaaaagggtaattgtccatttaagatgcgtaaaaacgtgcaccacaggttttaaacctgattcatgtaattgctgcaattctagcgcaaaagcctctttaaaataagcttcgatacgagctagttgttcttccggtgtcaataattcatcgtcagttacttgcaagtcttccgcagcgactagtggataagtggacaggttcgctaataaaccggtactcggtcgtttttgaaataataagcccttttgcgagcgaatcacaactgcaaacatcgcaactggtttttgttttgctttcttcgtcttgactggataatccaataaggtaccatcttgataactccggaaaaacggtgctaacgccgtctcaccaaccgttggattctttgccgtacaaacttgcgagccaaaatccatcacggcttggttaaagtcacctgggcgatctttgggaatcagcggtaaaatcgcatcgtaaaaaatgtggcggttctttgggttggcaatatcagcatcgattttcaataaccgactgaacacccgaaaagcattgccatcgattgccgggacgacttcgccaaaacaaatactggcgatagcgcccgctgtgtacggtccaatcccggctaacttttctaattcagccgcggttgttggccactgaccattgtaatcgtcgacgacttggcgcgctgctttttgtaagttacgcgcgcgcgaataataaccaagtccctcccacgttttcattaataagtcctctggagcggccgctaagtctgccaccgttggaaaagtcgccaaaaaccgttcatagtacggaatcactgtttgaacctgcgtttgctggagcatgatttcagatagccagacacgatagggctcttgattctggcgccaaggcaagtcccggcgattttcatcataccaagtcataaacgcggtttgaaacgcgtcccgttcactcggtgtcatctgatagttcttgttcgtcgatgaagtggttgattgcatcaatattaaatcctttccgatacaacgcttgttgcatcttcatccggcgttctcgtggttcgagtaatcgataacggcgccatttttttgcaccaagttcagcaagcgcgtcagcttcactatcttcatcggcttcaagggccaacgcttcaataattaaactaaggctgtcaccgccaaaccctttttgcattaaaccttgtttgactttttgctgctgttcaaagaatgaactatgacggtatttcttcgccaacttcttagcagctgctaacccaaccgcaacttgatcatccactgaataatgactaagtgcttgatcgatatgggcagcactaacgcctttttggattaatttctggcggaccactttggggcccttatccgcggtattaatcacagtacgaacgtagctatcggcgtaatcctgatcgtcgatataatgtaactcgcgtaattttgccaagctagtctggatcccttctggagtgatctcgtgttcgcgtaaatattgcgttagttccttttccgtccgcaattggtgactcagataattgagcgccaattgatacgctttggcattatcatcgtctttttgaatgtcgcgttgcagttgactatcaatctctaaatccttcgctaaacggtatttaatcaagacactctcggtcacgccgaaagcgaattgctcatcgataaaaatattatagcggcctgattttttctgtgccgttattttggtaatcttcggcatgttattctcccttgttacgtgttgctttgatgtttaaatagactttaaatccaatgaccacgacggcgagcactaaagtcccgatgatcagtggtaagctcttgtgttggaaggcataaacgccaattccgagtacaatcagcatggcgattaaaaattgatttcgttcccaaaaattcatgtggcttcgctccttactttgacttcctgtagcatagcataaatggcgcacccggacaaaagtcactgcttaattcccactattgaagcgatttttcagtgctaagtctgttatactgaatgcaatgagaaaaacgagtatcattattttatattaataggagcggattaaatgccagaacaaacaaaccaagtcgaagtcggccaacgttttccattgacgattaaacgaatcggcatcaatggtgaagggattggctattacaaacgcaaaattgtctttattccaggcgcacttcctgaagaagtggttgtcgcagaagtcaccaacgttgcccctcgtttcattgaagcaaaagtccacaaacttcgccaagcttcaccacaacgggttacccctaaggatgccacttacggccaagtcggtgggattgagcttgaacacttaagctatcctggccaacttgccttcaaaaaagacgtcgtcgtccaagcgcttgaaaaattcaaaccacaaggctacgccaaatacaatattaccgatacagtcggaatggaaaacccctggcattatcgcaacaaagcacaattccaagtccgcgaaatcgacggtcatttagcagctggcttatacgctccaagtagccatactttaattgatttgcctgaattcgcaacccaaaccgatttaacaatgaaaatcatccgaaccgtcttgaaattagtcgaatcactcggaattcccgtctttgatgaaactaagaatgccgggattttaaaaacattggtcgttcgcgaatctttttcaaccggtgaagcgcaactgaccttcattaccaactcccctaaactaccgcaaaagcacgcattgattacagccatccaagctgaattgcccgaagtggtttcaatcatgcaaaatatcaacaaagggaaaaacgtgctcgtttggggcgaccaaacgattcatctggctggtcaagaaacgattatggaaactttaaacgacgttcacttcgaattgactgcccgcgcctttttccaattgaatccagttcaaacggctaagatgtataacttagttcaagatgcacttgatctcacacctgaagatcgcctcgtcgatgcttattgtggggtgggtacaattggcttgagtcttgccaatcaagtcgcagaagtgcgcggcatggacacgattgccgattcaattgaagcggctaaacacaacgcagccatcaacgacattcaaaacgttgaatatgccgtaggggctgccgaagacctcctcccagaatggttggataatggcttcgtcccaactgccttggtggttgatccaccacgcactggcttagatcaaaaattaattgatgccattttagacagtcggccattgaaatttgtctacgtctcatgtaatccatcaacccttgcacgggatttaaaagcccttgtgcatacgtaccaagtggaaaaaatccaaccattggacatgttcccccaaacggcacgagttgaagcagttgtgacattaacactaaaacgcgatctataacgcaaaaaagcggtccatcaacaaacacatgttgatggaccgcttttttatttggactttaatcgcctaaacgcgttctataagtcatatccttccggttaaccctgaatggcaaacgattgcttgaagcaatccttcaccattctgtgttaatcctcaggatatacccgacttatgccacactctcattttttaatgctcagatcgtttcggttgtgacgcactctttttgaaacgtgctttcacaaccactttcttccgcttaacgccgaaattaacgtccatgcgcgcccctgattgcccgatgtaaaacgggatgcaaacccgttcaataaccacaatacaattgctccgcgaccatttaacccagcatcccgataacgccgtacactaagcgccaacgttggaataaacgtgagtaccccaagcaacccgataacgattatgtacagcactaatgcaccgctcatcttcagttgcacctttgcagcttgtgcaaatagcaaagcgaaaaatggcatgaaccaaacaatcattaaaatcaacatcgcccaccaataacccgtacgtgttgttcgccccgtaaaatcaaaataacctttaaaataatctcgccaagctgacttaaacgttacttgccctggtgtttcttgaatctcgcgcattgtgaatccccttccaaaactgattaacttaattgtaccgcatttcaccactaatttgatacaataaagaaaatcaacttggaggaattcttatgaaaatttatttcgcaaacgctctattctcagcagcagactttgattataacgctaaggttgttgctcaactgcgccaatcgattcctggtgtcgatatctatctcccacaagaaaacgccgcaattaatgacaagaatgcttatgccagctctgaaatgatcgcacaagccgatacagacgaactcgttgctagcgatctcgtcattgctgttttggatggtcctaccatcgatgttggcgttgctagtgaaatcggtgtggcatacggtcgccaaattccaatgatcggattatacaccgacagccgccaacaaggtgctacaaatccgcaaaaactagcagctttacaagagatcgccgaaaaccaattccattacttaaacctttacacaaccggcttaattaaacaaaacggcacgattgtgaataatttagacgcgttgattgaggcagtgcaagcccacgcctaattaaaaataaagccattcatttgttatctatagtgaatggctatttatattgtattttgagcataaaaaaaggattcaagctttgatatgcttgaatcccctaggttgaggttgatagcttggttgttgcgagctgattctgttttacattctggataatgttacacctcatacttctattcaattgtttttaatcgttggtctagcccactgctaatcgtttcactcgatctagtttggtcgtctatctttgacccgcatgtgcagttttagcgatgacgattaaattcgtgtttactacttgagcgatattctttaacagacatcagcctccgatatacttagatcttaatactacgaagagttacacttatgtttccattggaaccacgccttgcaatttctttttcgtactttaaatcttgatgtgtcgtacattcaaatctggtgcttgtgttttaaagtggtaaatctatttaaagctaacttggtttcacttaccaagctatctttcctcaccattaatatagcaccttctgtgaccggatacaatcaaaatgctcttaaatttaaaaaagtttttccatcatttctgacttgttatttttatcagaaatagctaaaaaaactgccattaacaatactgttaatggcagtttttaggatacatagctgtttttttattaatctctaacttgataattgcgttcgtgttccttaacaccttttaaaatgattggcgcgttgtccattgccaaatcaatttcatatttgctaccgtcttctggtagttctgcttggaattgattttcgtattcagccatcgtcaattgacgtcgtgcagcaagcattgctttgtggtccgcaccggctaattgtttttcaaatccgggttgcaaaataccggtgaagaattcactgattgcacctgaaccgtaactgaataaaccaattcgatcgccggctgccaattgcgttgattgttccaacaatgaaaggaagcctaggtataacgcgccagtatagatattaccaatttgacggctatacaatgtactttcttgataacggtctaataaatgtgcttgttctgcttccgttgcttctggcaggattgtccgcaatgccttcaaacccatctttgtgtatggtaaatggaacgttaaggctttgaaatctgagattgtgcggccagtttgagcgcgatagtctgcccaagttgcttggaaaaattcgatgtattgttcagttgaatatttgccacgcgcaaaagcttcttttgaatagttggggcgccagaaatcttgaatgtcatcactgtggatggccgttgccggttctaacgccaacaaatgtggtgctgcactaacgatcattgcaaccgcgccagcaccttgtgtcacttcacctggtgtatccagcccataacgggcgatatcggaaccgatgactaatgctctttgctctggatgcgccgctacaaagtcataagcggtcatcaaaccagcggttgccccgtaacaagcttctttaatttcaaaagcacgagcattttttaatcctaataagcgttgcacataaagggcaccggcttttgactgatcgattcctgattcagtgcctaaaattaataaaccaattgaatcacgattatcatcatccaacacttcaagagccgcgttagccgccattgtgacactgtcttgactgaggggggcaattgccatttgatcttgaccaattccaattgtgtatttgtcaggatcaacgcctcgcgcgttagctagcatcactaaatctaagtaggtattaggcgtaaaaaggcccatcttatcaattccgatttgcataataatcttccaatctatttgttttcagcacgcagttgcgctaacagctcggtggctgttgctgtatttaaatgtgtcgctttcaataataatggtaataattgcgttaattcagtctcggttgcgccagcggcaatcgccaacgacttcgcttgaagcgccatgtgtcctttttgaatcccgtctgacacaagtgctttgagcgcggcaaaattttgtgctaagccaacagctgcgataatgccggctaattcacgcgcattctgaacttttaacaagcgctgattaatctgcacggttggtagaataccaatcgatccgccaaccatcccaactggcagtggcagttcgattcgaccgcgtagttgctgatcagttgtccattcccaactcgaaagcggttggtaagcaccctttctagcagcataactatgcacgccggcttcaattgcgcgccaatcgttgcccgtcgctaacaccactgcatcgatgccgttcataatccctttattgtgggttgctgcgcgcgccacatccactttggcaaagtcactcgccgcaatcatcttttcggcaattgtttcgccagcaagcgtcgcagttgttaaggtagctggatcaatcgtcacacttgcggtcaccacggattcaaacgcggcattggtcaaaacactcaataaaagggtgccgcccaactgttcttgcacagcatgtgcgatggcttcacagattgtgttcacaatgttggcacccatcgcttctttggtatcaatttgcaattcaagtttcaaaaagcggtcgtcaataatcgtcggcgtgattttttgaagaccaccaccgcgtttaacaattgatggatgcgcagcccgcgcaacttcaaataaatggtcattgttgccactaatccaagctttagccgctactaagtcaactagcttctctaacacgacttcaccagtcatcagccgcgtcagttgttcagtcacaaagccgccattagctcgtgccatcttagccgcattattagccgccgcaataacggatggttcttcgatcgcaaacgggacttgatagacttgctgattgactaataaatcttgcaccacaccaagcggtacttggtactggccaatttggttttcaatcatattaccagcgatctcatctgacaagggttctgcagctgctaaacaatcagcatccgtctgacttaggtgaccttgttcaacaagcgttgctaaacgttcatccttcgttaattgatagaacttaggctttttcattacaccatgcctcatttaattgaatttcaaaagcaattcctaacccgccaccaatacataacgaagcaatccctgttgtttggtgcgtccgtttcaattggtgcattaacgttgtcatgatgcgcgtacctgaagcaccgattggatggcccaacgcaatagcgccaccggccacattaactttagcaggatcgacttgtaacccattttgaacggccacacttgaagcggcaaacgcttcgttaatttctaataaatcgatatcggctaatgtttgattttgttgcgctaataatttttgaattgcatcgaccggcgtgtaccccatgtaatctggatcagcaccgacttcttgatagccgaccaaagtggcttggtaaactaatccgagtgcagcagctttttccttgctcataacgatcatggcagaggcgccatcgttaatgccggaagcattggcaggtgttacagtcccatcttgttgaaaagctgggcgcaacttcgccattgcttcgatggttgtcgttgggcggataccttcatcttgttgtacttcaagcgttgctttgcgttgttgcaccgttacaggcacaatttcttcattaaaccaaccagcttgggtcgcttgcgcggctttttgatgagaagcgagtgcaaaagcgtcttgcatttcacgcgtaatgccgtatttagctgctacattttcgcctgtaatccccattggctggtgcgtaaacgcatcgtttaacccttcgctactgatgctatcaatcattgtttggtccccaaatttactcccaaaacgcatttgtttattcaaataaggcgcttgtgacatactttctgtaccgccaactaagacgatgtcagcatcgcccatgacgattgcactctgcgccaaccgaatcgcttttaagccggaaccacaaacttcattaactgtcattgctgtgcttgattgtgtcatcccactcttcaaagcgatttgccgtgcaacgttttgcccagaaccggcttgtaagacattcccgaaaattgcttgatcaatctgagttggatcaatcccggctgcttcaatcgccgctttagcagcaactgtccccaattcaaccgcgcttaaacttgcaagttggccccccaatttaccaatcggtgtccgctttgcactgataataaccacttcttgcataatatccctcttcatctataagtctaattattactataactaaattttcatgaaacgtctggtaattcacaatttctttaacttttttttagaaatccgcttggtaagctgagattattttaccattttatcggcatcgtgcattactcattagcgtaagtcattcaccggtgacgcttacaactaatctttaggaggaatccacatgcaaacatcatggttagcaacatcgatcgcttttgaattacaaaatacagactatccaaatgaaagtttacaacgtcgtatgaccgccgtaaaagaagacgttcaagccacggaaatccaagcagttggcgaagccctcgcaagtctccacgcaggtgacacatttgcaacagctactctaaccactaaatctgcttatatcgctaaataaaaaacataccaatctttgaggaggaattcaagatgaaacaactttgcttagaatttaaaaacagtgatgctaagagtcgtgtattgcgcttaaacaatattgatgacaacttagacgccgaaacagttagaagtgcgatgactaaaatcgcagcagccaatatgtttattaaaaaaggaattgaactctacaaagaaccagttggtgccaaatacgttgaacagattgaaacaccaatcttttctgacaaataattaagcagcatacagcccccaaatcgaatctgatttgggggctttttttgcgttttacataaattgattaacaccccttgtttccgcgataaactttggtgtaggcttacataaagtcgttcaaaggagttatcatgcccaattcatttaacttatcgcaaatattgcaatcaatgttacttaattgtttactggtaattgcgctaccactagcttttgccgggattttaacactaatcaatcgttcaactaaacggcgcttagcccattggtgggattactcacaacttttaattggcggcctaggcactgtgattcatgaactcagccatgctgttgcctgtttaatcttccaacaccaaattatcgatatacaactcttaaaattaaatctacgggataatcccgatcactcgcttggccatgtcaatcaccgataccattccggccgtctttggccaacaattggtaatctctggattgggattgccccgatttttggttgttcagccgccattttcggactgacttggttattagcacggcccacttttgcaacgtggatgacctttgctgaacatcccacttggcagttaaacgccatcggccccttgttcagccagctctggacgacgcaaccgagtgctctcttgctctggttaatcttaactagcatgattgccatcggtggttttgacttatccgcagctgattttaaaggcacgattccagggattattgccacagtcatcgcggtctgcctcgttactggtctgttttcatttgtgccaacagtcaacaccacgacttggctcattggtattctaacaccaatggcaattatcctaaccatcgccgctagcttgtcgggtgtttgttggctgattattgccgggattttcgcactattagaaaggacgacttatcatgcgcgtcattgacttactacagctattagctgatacacccaaaaacgatggcatctacttcgaaggccctgaagagctccaacctatcgcccactttgagctcgccgtcgttgacgaacagccacgactattactgcagttaaaggccgcagacaaaaagccgctgaagcagtgggaatttagcctattattaaatcaaaaaaactactaccaacattatatgtatgtccaaacaaagacgggggactatcctttgtttggttttcgcgttgctgctgacaaaattctactcggataatgtttgttcaagttgcgttaaataacgatgactcgcaatcatttctcgtgcatcattttgatcggctaattgaatctcatagatcgaactagcatcaggatttaacaatggcaatacgcgggcccagtcaattttgccagtccctaattgcaacccatcatgcttcaaacccatcgaatcaaccagatgataatgaacgacgtgctcacgcaaagttgccagactctgcaagaaagcattctgatcaccctgcaacttgataaaacagtgactcgtatcaaacgctaagcggtaacctttatcaaagatggcctgatcaaaaatcggattgccataatagaaaatcggtgaaattgaattttcgaacataatattttgtccgccaatccgctgtaaataatcgaggcgcttgaacaaaacacgaatggcatccgtaatattactgtaacccgtcgtcaattcttcaattggatcatcataagagccatgcaccaatagttggacatcttcagctttcgctaactgcaataaatcgagtgttgattgccataaaaagcggtatcgggctggcgaacttgcttcattcatcgacagttcaatatgatgcccttcgaaactcattgggtggtgtaaaataatccgttcaacctgctgactgcgtacataacgaattttttcgcgtaaacgtactagcccagttggcgtgacatcttcggctgttagatgaaattcaaaatacgttggctgatactgcattcgatcagcaatttgctgatcgttaatccctgcttttaagcctaatcgcatcgtcatccctcttttctctactagttcctatttctattctaacattctaaagacctaagaatcgtaaaagcggctcaccaagtaatggtgggccgcttttttggttggcgttaaacgtgctttttgaaacgcacgctatgcatttagtaccttgttcaggaagtcttttgttctttcgttttgtggggtgtcaaagatttcctgtggtgtgccttgttcgacaatgtgtccatctgccatgaagatgacgcggtctgccacttctttggcaaagcccatttcgtgagtcacgacaaccatcgtcatcccttctttggctaaccgcttcataacggccaacacgtcgccgaccatttcaggatcgagcgctgatgttggttcgtcgaacaagagaatatcaggtttcatcgctaaggcacgcgcaatggcgacccgttgtttttgaccacctgatagcgattgtggttttgcatcgaatttctctgataaaccaaccgtttcaagtagtttcttggcggtttcttttgcttctgccggcgtcattttaccgagttccactggtgcgagtgtaatattttcagcgaccgttagatttttgaaaagattaaagtgttggaataccatcccgattttttcgcgaatttgattcaaatcactcttaggatcactgaggttgtacccatcaacgataatctcaccactcgtgggttcttctaagcgattcaagcagcgcaagaacgtgctctttcctgaacctgaggggccgatcatgacaaccacttcattatcaccgaccgttaagtccaaatcttttaacacttcgttactgccgtaattcttaataagatgagacacttcaattctattcattagttatctattctcccctcaatgtacttcgataaccacgtgagtaacgtgataacgatcagatagattaaggcaatcattgcccaaattttgaacccttcaaggttgcgggcgatgataattttacccgtctgtgtcaattcgagaatcccgatgattgataaaattgacgtatctttcaatgtgatgatgaattggttaatgaaggatggaatcataatgcggatcccttgtggtaaaacaacgcgccgcattgctttaccatatggtaaccctaaactccgcgctgcttccatttgtccggtgctaaccgcgccaatgccccctttgacaaaggctgcagtataagccccttcattgaacatcagcgtgatgaccccagccacaatcgctggaatcttctgcccagttaaacttggaatcccagtatagatgaataacgcaagcaccaagagtggtaacccacggaaaatatagatgaccgtatctgaaacgccacgcgcaaaccggttaggtaatacgccgagtaaaccgaagaagaccccaaaaatggttgcgaagaaaatcgcaatgactgttaataataacgtctggcctaaaccgctcaacaacgcatctttattttctttcaataatccaaaaaagctgtgatcaacggttgcttttttagttgattctgtacttaaatattttgctttaattttgtcgtattgaccatttgcttttaatttagcaagacctttattgaatttagcaatgagttcaggattgctccctttcttaacggcgaatccatattcgccaccttgagcaggtttggtgacaatcttgagtttcaagcccgtcttaatcccatattgcataacgggctcgtcttcaaaacaggctgccgaattaccattcacaacatcattatacatattatctgaatcatcaaacgtaacggtggtaaagccatattctttcgctttggccgtcgcataggccccagcggaagtccctgttttaatcgcaacacgtttaccgcgcaacccttctaagcctttaatcttactgtccttttgaacggccattacaaccccggtcttgtagtaaggatcagcgaaatcgaattttgcttgccgttcaggtgtaattgtcatcccggcaatcacgccgtcaatttgttccgactgaacggcttgaaccgctgcgttgaatcccaacggtttaatattcactttaaagccctcggacttcgcaactgccttcatgatatcaatatcaataccgacatattgattcttctcattcgcaaactcgaatggtggataggtcacatccgtaccgatttcataagttttttcagcggcttgaacctgattattcacttgactcccaaatacaaataagcctgcgagtaaacagctgcctaaaaatacgagtaatttcttcatgtgatcctcccctaatgcctgaccaacttctctcatcgctcttaacgcgttattaagattagattagacgttttataatagtatgttaataattataagcataaaatccaaatttgtcgaattttttaccacaatattgaaaagcagactctaatccctaaataatcgcattaaaaaagcccgcagataaggcggactttcactaaatgagaattgaatgagtttattttctgctataatggaagaactactactcaaggagtctactatgattaaacccattatgcgtgacactcaattcttagctcaaaaagcagttccagcaacaccagctgataccgatgtgctgaccgatttacgtgatactttacaagccaacacagaacgttgcgtcggaatggctgccaacatgattggcatcaataaacggattatcatcgttcaaatgggcgtcttacctgtgattcttgtgaatccacagattgtgcgtcaggataaaccataccaaacaactgaaggttgtctttcattgaccggtgaacgtccgacaacccgttatgaaacaatcgaggtcacttaccaagaccaatcctttaagccgcacaagcaggctttctcaggctggattgcacagattattcaacatgaggtggatcactgcgaagggcttatcatttaaaacaacaaaaaacgttcaaccactccaatgtacggagtggttgaacgttttttacaggttatttattttcttttttagtgtctttttttaattcttctgccaagtcgataatgtatttcttcaagtcatctttgacttctgggtgttttaacccatattcgatacttgtttctagataaccgaatttgttaccaacatcgtagcgccggcctttgaattcatgggcgaagacgcgttgggtcttgttcaattcatcaatcgcatcggttaattgaatttcaccaccaagacccggtttttggttttctaaaacatcaaaaatttcaggggttaataagtaacgaccaatgatcgctaaatcactaggtgccttatcaatatctggcttttcaacgaagttcttaacgttgtataaatcgtctttaactttgttttctgggttaatcacgccgtatttgtccacttcattatgtgggaccttcataacggctaattgtgatgcatgtgtttcttcatattcattaattagttgtttactcaatggcaccttatcatccatcaagtcatcacctaacataacgacaaaaggttcgtcagcaacgaatgattttgcaaggcgcactgcatcccctaatccgtttggatgtgattggcgaatgaagtacaagttaacccccatatcagtcgtttcgttgaccatcttcaacatagcggtcttattcttggctttcaagttttgttccaactctggtgctgaatcaaagtgatcttcaattgggcgtttgcccttaccagtgataattaagatatcttcaatccctgaagcctttgcttcttccacgataaattgaatcgttggtttatcaacaattggcaacatttccttcgccatcgctttggtagctggtagaaaacgagtgcctagtccggctgctggaataactgctttacgtactttcatctactaaaatcccccataacttatagtctaataacagtatgccataaaaaagtggatttgcaccaattatatgccgaaaatgaggaaaagattaacaagcgcttaggactttattaatcttttcacaattgttttgtaagcgattcccatcattggtattctcaagaggttaacaataaaggaggtcttcgatgtttctactacatcccaaacatatcaatacatatcacgagtgtcttcctgtgccactcatcatcaagcgcggtgttgattataacttctgtgagctggatcaatcgtcaattccccgttcttaccaaactagtattacgagtgacacaatggtgattattccctataaaaaatcgcaaagtcttgtgttagaccgcataaccggtctccaaattagtccgcgttctacccggcaactaatgcgcgcttataatcgccatcagatcatggacttctcacaaccccggcacctttgccattgtttcaattggtatcgtaagattccacacatcaatggcgaatatcagtatttaccattaagtggcacggctcatcaaaacgcaccgtggttagcgctccactacgtccgtgattacgaagttagcgataaccatctctacgttacattgctaaatgactgtacctgtatcctcccttataaaggccgtcaaatcgatactgaaattcatcaatgtgcagccattggcaaagtccaacttggctgtctcactgtgtgtgccactaatttcggctatcaaatcaagctcaagacttgtttcaagccaagcatcgtccatcgcttcgatgattgccattgccatctgtgctcgaatgttccgaaaacagctactgaactactcggattactcaacgcacttaaaatgcataaggaaaatttcatttaccaagccgtaatccatgaataccccgaattcagcgtatttgacattcagtgctatatcaaaagtgttaaagaactaattcaaaaattacgccaattataaattaacccgaagtcgctatttacaataattttcatttgtatttcaatgcatttgcgcaaattaaagctgaaacggattgatttaccgctaaaatcggcgattacccttctttatgcaaacccgctatagtgaacttaccggtaattcacactgtgagctcatagtagacaggatgctttacaatgacccaatcagatttacaaactgcttttgattttattatacaagacgacaccctcatctatggcgttctcaaagatctccacgttccaagacaacgtagcaacttcgccgatctctatcaaattggcgtcattgcctttgtcgaagcctacgatcatttcccaggcaatattgaagtcgaaacccaccgcttcatggtttacgcgtatcaggccgttaaatgggcgattatgatgaccttccgcaaggataataaccatgacaaacgaattggcttcgttaaccgggcaaacgatgatgattccgtgatggactatctcgaccaagttgctgatccctactgcaatccagaagaggctgccatctgtaacgacctcttcgagcgtctctatcaagtttgtacaccacgcgaaaaacgcttcttagtcctccgctacttctacaacgccaccctaaaagaaatcgccgcagacttaaacatcacacggcgaacggctaataatattaagtttaaggtgcaaaagaagtttagtgcgttattagtataattaaaaaaggtgagcaatcatatgattactcacctttttaattatactaatcgatttttgccataaatttttgtaatgcatcttgccaggttggtacttcaaatccagttgccttgatcttcgttaaatccataattgaatgtcttggacggaaggctttttggggatattcgtctgatgtaacaggactcacttcaacagctttgtccttcaagatttcactcgcaaattcataccaagtacatgaattgtcatttgaaagttggtataaaccataagggacgtcgtttttaactgaatataacatgaattcagccaatgtccgggtccaagttggccgaccgacttgatcactaacaaccgttaaatgatcatgtgttttagcaaggtttaacatggtataaacaaagttcttaccatattcaccaaagacccatgatgtccggatgatgtaatacttgctcatcgtatttgcaacggcttcttcaccagccaattttgtgcgaccatattcattcttaggtgcagctggggtttcttctgtgtacatttgatcattcgtaccatcaaagacataatccgtactaatgtaaacaagcgttgcgccgattgcttcagcagcattggcaatgttttgcgttccaaccacgttcactttgtaattgattgacttgccaggttcttcttcagcagcatcgacagctgtataagcagcacagtgataaaccaattccggcttattcttttcgaagtaagttgtgactgccgctgaatcagtaatatctaactcagtagcatctgtccccacgtattcaatttgattttcatctaataagtgccgtaattcggtccctaattgaccatttgcaccagtgattaaaattttcatgagtgatctcctcgcttgatataattcaataatttaggtttcgttaaccataatacaacgccgtataacaaaataccaacgccaacttgtaaaactagttgtaacatactaaatggtagcgttaggttcaaataaagaactacggcaaacatcatcagaccacctaaaaggtatttccacacttccgccgtcatttgtcgaatacttaactcatgccgaacgacatagaattgataggccgttacactgatttctgaaataactgtcgcaatcattgcaccttgtgtccctaaccataaaatcattggcacattcaagataatgttgacaacagcgccaaccgtcaccgaaatcgtaaattctttgttgtgtccggttggcatcaagtattgcacacccaagacattactccaggcaatcattagaatcacgatcgactcgaccatcatcaatggcccaacagcggcgaaatccttgccaaaaaacatggtcgcaaagttcggcgcaatcgctgcaatcccaaacatcatggggactgaaaccgcactgacaaaatcaaatgactggtaaagatactttttcacttgttcgtgatcacctttggcaaacgtattggcaactcgcggcaacatcacagttcccgttgctgtcacgattgctaaaaccattttgacaattttatcggaattatcatagaagccggcagcttcaaccgaaaccattttcccaaccatggtcttatttaagattaaatagacgtgtgtcgcaatttgcggaataaacaagactaaagatggttggaaatgccgccaaatttttaatttatgccagtcaggcatatcaatatagtgttttaaatatgggaataacgttaaattaccaatcaattgcgagattgataaaattgcaatgtataacgttaaatccccctggttcttcacaaatatgaagatacaggcaagcgagattaacttaatgatgatgtttcgtaaaaccgttaccttgaagttctcaaagcccataaagaaccacgagatatcaaatgctgccgcaacaatcaaaatcgcttgcatcaagtaagcttgatgatagtctttaacaaaccataaaaagccaaagaaaagtgctaatgcagccacaatcgtcactaatcgcattagaaaaacttcccaaaaaatttgagaagctttcgctcgattatctcgataataagcaatttgccgatttccatatagagataccccgatactcccaattaaaataaagtactgcgtatttgaattggtgaaggagttaatcccaacgcccgttgggcctaaaacccgggcaatatatggcatcgtaatgagtggtactaacagtacaaatacctggtagaacacattatagagatagttcttaataatcttcattgattaatcctttaattcgtccttaacgacttgtaatgctgcatggatcacttggtgcatatcataataacgatattggcctaaacgaccaccgaaaaccactttgggttctgtcgatgataggtcacggtaagctttgtacaaacggttattcttatcgttattgattggatagtaaggttcgtcgccacgcgaccagttagcgggatattctttggtaacgatggtcttgttcttgtcacctttaccgaattcaaaatgtttatgttcaatcacccgcgtgtatggtgtttcagcgtccgtgtagttaacaaccgcgttcccttggtagttatcaatatccatttcttccgtttcaaaacgtaagctccggtattcaagttcgcctaattgataattgaagaactgatcaatcatcccagtaaagatgactttatcgtattgatcaatatattcttgttttttatcgaagaaatcaacaccagtttcaacatcgattaaatcactatctaacatcttttcgatgatttgtgtatacccaccaattggaatcccttggtatgtatcgttgaagtagttattgtcataagttaaacggactgggaggcgacgaataatgaaagctggtaattcggttgctttttggccccattgtttttcagtataacctttgatcagttttttatagatatccgttccaattaatgaaatggcttgttcttccaaattttcaggtgttttatcacctaacaccttgcgttgttcagcaattttagcggccgcttcagcgggtgtcgctacgccccacaacttattgaacgtattcatgttgaatggcaagttatagatttcacccttgtagttggcaacagggctattggtgtaacggttgaattctgcgaattggttaatatattcccagatttctttgttgctggtatggaaaatgtgggcaccatattgatgtacttggatgccatcaacttcctttgtatagatgtttccagcgatgtgatcccgcttttcgattacttttacatggttcccacgtttggccgcttcatatgcgaaggttgcgccaaacaggccagaaccaactactaaataattagtcataaatatatacctcaccatcttttaaattatttgtgattttacgattcaaatagtgtctatagttaacaaagaagaaaaacattaaaataaataaatcaaatgaccattggatggataacattcctaatactaagaagataattgtgaaataaacggcactatcataaatcgcttgatcgtactgatatcctgtgatttgatgtatttgtaaccatttcgttgattttttcaaatcgagtaatagatgaataatatatatcacaataatgattccaataatcagcccaaattgcgctagcacagctccccacgcactttgatctggaaattctttattctttaaaaataattgatattcagctagttgtttaactgatgatggtgcattgatgaaattaaaatgactagtttgaccaaagccaacaccaatcaacggattctttaaaacagtaataaacaccgcttgtgttgctaatagccgcattgttgttgaatcagaatccgtcttaccaactgtaaaacttaataacatattttttaacgctggtactctcattacgattaatgctaataataatccagcaataacatacagaacgattagatttaaccgttcccgacctttgacagcccatagtaaaagtaacgccattacaacgactgccagaataccggtacttgtcttagcaagcaccaacacgcccatcaatacagcgaataacccataataaaaccagccatgatagcgactattcggaaaaaataggttgatcttatttttcatcgcgctaatgatgaagggggcaaaaccaatcgccaatactcctgctaaaaatccagattccgcatataacccatttacccgttgcgtactttgcgtgtaactaattttttcaaaagaaccaggatttagaatattatgatattccagataccgtccgattaattcgacgatactctctaaacgaccacctaaaaatacataaataatttgaaccagacaaatgccaatcaataggacaaatgcccaaaaattccccgttacaatctttttaatctgataatcattccgcatcaataggttcataacaaaatatagaatcaaaaaattagcaactgtaatcatcgcaataatgaacttctttaaaatactaccgattccatagccttcatttgttaatccaataaaagctagtagttggctaagtgcaagcaacccgatgaaggcatagtgtctaagctttaaattatccaacggttctaaagaaatatggtccactaaccgtcgataaagaataataagtatgcctaaaaaagcagcttgtgagaagaatgggatatttaaaatatttttttgaataacactaattaaaattaataactgttccataccctacctactatctaatattaatcaactcgtctaatctgcggattaaaccctaaaccagtaaacgtcccttttaagatagcaccagcccttttaaaacgactatccttagcttttcctaacgttgaaaatgcataaagaatatgacgaatggttaatttgatggttgccccttttcctttatataacttactgatgtaaattaagtttctatatagataaaaataccgattaatacgatccttcgaatcgttaaaaatagtaatatccgttaaattgttaggtgtcttgtgtaccacaacactgtcaattacaaaataagatgatttcgcctgactgactcgaattgtatactcagtatcatctccccagatgaaaagctcttgcgttggcacgccatattgttttactatttcccgggttaagaaaaccgaaacaaatgttccttggctgacagacactaacccatcattaatcttgtctggccattcaaatgcaggcattggcatattacatgatgtgccatccatccagcgaacattactacataagaagccaaaatcatcttttaagaatgctgctttatctaataactgatgtgctgcatttgaattaggaatcgtgtcatcatccataatccagaaatattggtcatctgtttgttcataagccatgaccatgccatgtgcaaaaccaccagcgccacctagattttcatcagaattcttgataataaacttatcagccgataaagttgctaaataatcagccgttccgtccgtacttttattattcacaataacaatgtgggcaacattttcatttttttctaatgctgctaaacattctttcaataatgctagtcggttataagtaactaagaccgcacaaatattacgattttttgattccataactaatcctctctgattgttgcgataatttcagcatgataatctggagcttccgattcagccacttgacttccaccttcaacttcattcacataccgatcatttaaagcaactctttgtgtggccttcatttgataccactcatactctaaatctgcgtgtcctatatcaattgcctgataaccaagcttagccaagtcataagccataactgttgcggtgggccctaatgcaattaaaatcaaagcatctgatgctacctgctccttaatgatatccataatagcgtcgtattgatcaaacgcattctgcgcagggcctaaaatgcgtttaacagacttagcattactcaataaatcattaccaacaccaaagcgcgttgcttgtccttctacaataactacttcacgatcttgccagatttgtttgagtaattcaaaataatacgccgtttgacttttatcacgtcggtcaatatagaagcgactcatgttcgcatcataaaatactgattgagcttgtaaataaggacgccaagcatgattgtaacgcgctattaattcaatccaagcatttttattttggggcatatactgactgagaccgttaaaaacatctggtatacagattgctaacttaggcgcatcagtcgctgtaataacctcttttaaacgttcactcaatgcttcggatccttcttgaaaagcatagctattctcattcaatagccactttaactcaccatcgccaaaacgagtgaccgacattttttgcactgtaatttgctttaaagtcgtttcaagaccaactacttttggtttatcagcagagcctcgatacttcaaatatcgtccaagcaaaataggatgttttaatcccatcacaatattgtacattggcgatgttagaaaacgattatacaaatttgtatttttaatcctctccatttattaaatcatcctattctgaaactatttatttttattgaccgtttttagcgtagttggcttccacggctgctttttctgcttgccaccagtcttcatgttcacgataccagtcgatggtatgttgtaagcctgatttaaaatcagtgaattctggttgccagcctaattcttcccgtaacttcgttgaatcgatggcatagcgtaagtcatgacccggacggtctttaacttgatcataagcatctttgggttgccccattaattctaagattaattccaaaacatctttgttattttgttcgccatcggcaccgattaaataagtttcaccgattttgcctttggttaaaattgcccaaacggcacttgaatgatcattcgtatgaatccaatcacgcacattttgacctgaaccgtaaagttttggtcgaatcccacttaaaatattggtaatttgacgtggaatgaatttttcaatgtgttggtaaggaccatagttgtttgaacagtttgaaatagttgcttgtaagccaaatgaacggacccaagctcggactaacaagtctgagctcgcctttgatgatgaataagggctacttgggttataacgcgtttcaggcgtgaatttttcaccaacgccttcgccgtgtcctggtaagtcttcacgcaatggtaaatcaccgtatacttcatcggttgaaacgtggtgataacgcacattatacttgcgacatgcttcaatcaacgtatatgagccgataatgttcgtttgaataaaaggtgaaggatcctttagagagttatcgttgtgactttcggcagcatagtgtacaactgcgtctgtcttttgaactaacttatcgactaattcagcgtcacagatatcgccaacaactaattccacacggtctgctggtaaaccggctaagttagcgcgattgccagcgtaagttaatttatctaaaaccgtcacgtgaacttctgggtggttattcaccacataatgcacgaagttagaaccgataaagccggccccaccagtaacaataatatttttcatagtgtgtcgatctccttaaatttcaccgtaaacaaacggattatctttttcaaattcagtaaaggttggttggttggcatctttttcagacgtaattgcttggtcaaaatcaattggccaatcaatgtttaattctggtgtcttgaatgaaataccgccgtcagcttctgcatcatagtagccatcacatttatacaagaagttaacgttatccgtcaaagtgacaaagccatgggcgaagccctttggaacaagtaattgacggtgattgctggcagaaaggatgtacccttcccattgtttgtaagttggtgaacctgcacgaacgtcaacgatgacatctaagacagccccagtcactacgcgaattaatttcgtttgcgcagctttgccgcgttggaaatgtaagcctcgtaaaacacctgcttgcgttgaaagtgagtgattatcttgaatgaaatcaatatcgatgcccgcttctttgaaatcgcgatctgaataagattctgtaaagaatccacgatgatcaccaaagacggctggttcaataattttaacgtcttgtaatttagttgttgtgacttttaacttacccatgattacttacccctaatcttcttttactaatcgcaataaatattggccgtagtcgttcttcttgagtggttgtgccaattcaatcacttttgctttatcgatatagttcattcggtaagcaatttcttctagacacgccactttcaagttttgccgtttttgaacggtcgcaataaaactgctggcttcttgtaatgaatcgtgggttccagtatctaaccaagcaaacccacggcccattaattcaacatctagctggcctttttcaagatacgctttgttgatgtctgtaatttctagttcgccacgtggtgaaggtttaatattcttcgcaatgtcgacaacttggttgtcgtagaagtataacccagtcaccgcatagttacttgccggatgttctggcttttcaacgattgatttagcatgcatattttcatcaaaatcaacaacgccaaagcgttctggatcattcacatgataaccaaaaacggttgcgcctgattctttttgagccgctctttggagcatttctgaaaggccaccaccataatagatgttgtcacctaagattaagcatactgaatcatcgccgatgaagtccgccccaatcacgaaagcctctgccaaaccattgggttgttcttgaacggcgtattcgatgtttaaccctaagtcattgccgttgccaaataattctttaaaccgtggtgtatcagttggggttgagataatcataatatcttgaatcccggccaacatgagcactgacattggatagtaaatcattggtttgtcatagattggaatcaattgttttgataaagcgcgtgtgatgggatacaaacgtgtcccagaaccgcctgctagaataatacctttcataaaaaactcccccttaagtttgaactaattaatttagaaatattatgtccatttacttcttaacagattttaaaattctatatattaaatacattagataattaaattcttcatttctccaaaacaaacctgtaaacagaatacataatattaaaatcgcaattatggagcgtacaattattcctgttagctcaccaatcagtacaaatgaagtgattgtgtaaaccatccctataattaaaactcctaaaattataaataaatattgcttgattaaaaatgattttacactctttttaaatccgtaatggaatatttgcctattttcccaccaactacttattaaaatagtcgttaatagagtacctgttaggacaccatttattccccaacctggatgctcctatcctagtatttggtacataaatttctgaacagttgtgccataattaataaaacaagataggagcattccaatgaaacgatatcaagatgattttaaagccagcattgtgaagatgcatcgtgaagagaaaagatctattcgctcgctttccgaggaatacggtgtttctccagccgcaattcataactgggttaaaggcgctaaatcagttgagctagaagacggtactgaagtaacgtccaaagaattaaaacaacttcaaaaggaaaatcagcgattaaaggaggaacttgaaattttaaaagctgcggcggtgttactgggaaagcattaggacgaattaattgccttgtcttcatagaagatcagttattgcgacaccgcttatcaattattctttcggcactgaaattaccgcgcagcacctattaccattggaaaagatatcaacctagtcaacacgaacgtgttgataatcagctcaaagaaaaaattaaattgatttgggaaaataattatcgtgcctatggttatccacgaataacgatggtgcttcgcaagtcaggcatctgtgttgggtcaaaacgaattttacgattaatgagggaaatggagattcactctttaatgaatcggcgatttaaaaaacctggcactcatgtggatcattcacaacgccccaatttaatcaagcaccagcccaatgcaaggatatggcgtgctgacattacttatttggaattacgtccaggaacctgggtttatctcagttctatttacgaaccaaaggttcatcaagttcttgctttcaagattggtcgtcagatggaggcgacgttagttgtagaaacgattaatcaggcgcttgaatgtcatcaaaagccacaatattttcactctgacatgggttcacagtacaccagcaacgaagttgaaactttacttgaacggcatcagatcagccactcatactcaaaacaaggttatccttatgataatgggccaattgaagcttttcactcattgttgaagagagagtttgcctttcaaacaactttttccaattttgaggacttggtaatccgaacctcaaattacatcagttggtttaattccgacagaattagaacgagtgtttagaaaaagatgtgccatttattgacataggagcagagtgtactacttcacaaataatttcaacgataaaattaattcagaaattcattttttgaatcatacatttagctaatgctcgtaataatttgattgatataagtttcatcatgcgaatcactaataacacgaccactgggaatctcatttacatattttcctttgataggtattcgtgtctgagcatgcattttaaaccattcgtattcaacatccgcatggccaatatctatcgcttgatagcccaaaatagataaatcaaatgctaataccgttgctgttggtcctaatgcaatcagaattaaatcatcaatatttgaatgttgtcgtgttacttttaatatttctgaataagaagcaaatgcgttgttatgcggacagataattcgctgtacacttttagtgttttcaagaagactattaccaacgccaaatctagtctggtctccttccaccaaaatcacatttttattattccataactcctttaactttttaaagtagcttaaactatcattcttgtttaccctatcaacataaggccttgttatatttgcatcataataaaccttatttttgtcagtaaactccagccacttaaatccatactcaccaattaaaaagcgccatgaatctgcactatagggcacatactgcttaaccgatttaaaaacatcaggaatacaaataatgatgtcctcactatctgatatcaaaattttgcgtagtcgctgtgccagctctggggaattatcttgaaacgaatttttattgttattcatcatccatttaaactcaccgtctccataacgagcaaccgagactttattttttataatatagtctaacgtttccgatatattcatcactttgggcttatcagaaaacaacataaacatcaagtatctgatcagaaatacaggatggcaaagtttcctaaatagctcatataaaaaagagtttgataatttatgtttaaaaaaatcctttattgtatgacgaagtcttttattattcaatctataaatatcctcctaaaacaaactatactcaattaaataaattattattatacaataaataactaattgatggccccacgtcaacaaactctatagtaatataaagtaataagttgactactaaaagtatgctcattattgacttactaatataaaatcctttttttaaattaaaatacataataaaacttacatagaccgcgaaagtagtattacgtgatattctcaaaaaattaccatcaatgaaactcaggggtatagttaacaacccaacacacgcaagcgccatcaatatagtaattttattttttgtattcttatttagctcattgttaagtattatcctacgatagcagaaataaactaaaatgaaactaaataatgcaattaaatcattaattatccaaccgttatgaatgctatcaaactgtaaataattactgacaccccgcattgaagataactgattccccaaaataatgataatattattggttactgttttattcatcatagcaataaacattagaaatattacaacaatatatatcttgagcatatttttcggagaaattcttagtataatatatattaacggatatattaagaatatataaccaagagactgaatagaagcagcaagtaatataaaaataatagaaataacaaatctttttttagtaaaatcaattaaaaaagttgttgaccagactagtaatgccatcattaatgaatttctaatttgaatagcatcataaacgaaaggagaaaataaatacaagatacaaaataaattagtattcttagaactaaatttcctcattgaacaaactaatagaagaaaaataatactatatgttagtatacgaaatcctgtatatgaaattcctgcatactgaaagggagtcatatagagtaagaaacccttatcatatgttgttgctttatacccaaattcatataaagcacgataagcattataatctggtacaaaactacttgtataaccaacaattatagtttgtacaagaaataaccagaataatgatatattactcaatgaccgcacattatttgttagtaagcagccaccgactgcaattatcaataatcctagtaacatttaatcacctaaattcacaaaataatattcatacttaaaactctatggttaattttaaaccactcagtataccattaaaaatacttattaatttatccttcttattgctttcatacaatattactaacgtaattatttttaatagacgtaatattgtcataaatgagataaaatttttatggtactttcgtgaaatataaattatattttgtgccatataaaacttgcggaacgctgaatgattctgtatttcgattttaaatcccaataatttagaatatgtaattttcccaatttcgtgtattaataccgcattattaactctgattatcttatagccgagcttcctaacacgtatgcaaaagtcaaaatcaacccaatctataaacatctgttcatcatattttccaaccttttcccacactgaaacatttgtaagcgctccagatgtaatacacttatctaataacaaagttgcttcacttgcaagagtttcaaaactagtatttctatctcttatggtgggacatataataccaacgctttctatttcaatgaaattaaaatatttttgtaacatatctttttcagctacagaatcttgatcaagagtaagtacccactctgtccgattattttgtaatgttgccattatctgatttaaagcagtagcaataccaagattttttatatttttaatcaaagttatgttgtaacctttaatcaactcagtaagctcattgatattatttgaattattatctacaatcacaagattcttacactgtttataaatagattcaatattcatacgtagtctctcaatatttggattataggttactattccaactccaattttaatcatgataactccttaatacttatcaaataatatttgcaatttacatataacaacaactggaaaaaaactatagttcagtttagaactaaataataattgaaacttttttctaatcgaatctctatacgttgctatgtttgttactaatacttcattatcctctctgaggtactttttaaattcccctgcaagaattctagaagtattatattttaaagattcttcgcggcttaaattaatctcttttaaaattctttttaaagtgatttttccggaagacgttgtattagtttcatatcgcctaaaataaatatatgagtgcgaatcatatatagtctttccgccaattgccaaatttagtctataaatccatgaatcatgtccagcaagttgatttatattatttgtgctaatactcaagttatttaaattgttattaaaaaccatcgtacagcccgctacactacttcttatcatagcatgaccaaaattaatatcttgtaaattatactgtttttcacctaacttttttagatccttatccactaaagtaagtcctgaaaaatataatttgtacttattgttacctttacctaactgtttaatcgcgctaattagtttgtcaggtaaccacacatcatcctgatcacaaaaagcataataatctgcagtatttttagctaatctacataaactaaaaaagctccttgtatatccaaggttatgttcaagaaaaacagttattcgaggatccttttctgcaaactttctaactatattcttagtagaatcacttgaaccatcatcccgtataaataaatgtactttaactcctacctgagaaagcacactttctatctgctcttctaaaaaacattctccattatatgttgataatagtaccgaaactgtctccatactaaattatattctccaagtcatttattatacaaatctactataaatatttaacataattttattgacacattttttatcaaacttttgagcaaccaatcgattattactgcccattttcttacgtaactcgtcattctctagcaagacttcaataccgtttgaaaatccaaaagtatccaacggatcataataatatcctgtaattccctgttttgtataatctctaataccatttatattagaagctaataacggtaaaccactagccattgcctcaattcccgcaagaccaaatccctcacgcaatgaaggcataatagcaaggtcagctattctatatatttcttccacatgaggttgatatcccaaaaaatgtacttgattatttagccctaatctacctaccaaatctctcaaatttttttcctcattaccaataccacataacaataaattaatatttttattctttagtaacgagattgccttaatagtcatttcttgattctttcgcttacttaactctcctacttgtattactgtaaatttattattaatttttaactttaattccttattaataggtgcgttcaaaaatttattagtatcaattccaacactaggaatataatcaacattctttgcatagaacttttgttttgccctgttaaaatcttctttattaatagttattaagtcatcagtaaaaccagataatattttttctattggataaaataacaaccagtctttttttcgcccacctgtgaagaattgaaaaccatgagctgtataaatcactggaatatgttttttctttccaactaatcttgccaaaacgctagctaacggggaatgagtgtgtatcaaagagaaacgagtctcacctgtaatatgaagtaattgtttataggccgtcaaattcgaattaatcgttccgattccacgagaaaaatcgacttgataatataaaacattatgctcttttagatattgtttaaaatccgtaacctgttgcttatccatagaatctccagattcgaaattggttgcaacacttatagtacatcccttatcctgtaacattctaatattgtcgagattgaactgttttatcatcgatgctaccgatgatatcattagaacattctttccctttatcattatctagctccatccccggtcactacaacacgaattgtctcaaagaaaatctcaatatcagtcaataccccaaaatgctttatgtagtacatatcattagcaagcttttgtgctggcgtatcatcgtaaccaccgtgaacttgagcataaccgcttagaccgggtttaaccaataaacgttgctcaaaaccttcaatgtcttcactgaattgttgcgtgaatattggccgttctggtcttggaccaatcaaactcatgtcccctttaattactgaccacaattgtggtaattcatccactcgagttttacgcataaaatgaccaacccgtgttacgcgtgggtcttctttctttgcccacattgcaccagatttcttctccgcatcactatacattgatcgtagcttagttactttaaacgattggcccattagcccaacacgctcttggctatagaagcacttgcccggtgtttctaacttaactaaaatcatagaaattagaataataattgaagctggaatcatcaatagcgttgcgaagattagatcgaataaacgcttaaatggtaaatagatgtgatgaaacggttgatccaatttagctacaaaatcatgttcatctactgtttgtgtatgactggtttggttttccatgataagattccccctaatccgttaacgattcccaatataactttaacccagtcataatatcataatgcggctgatagcctaaacgtcttaatcgtgtaatatctgcatatgagtgcttaatatctccaacacgttcaactttatgaataatttgtagctcccgattaataatttgttcatacacctgaattacttgattaaggctagtatgtttaccggcaccaacattaaaaacttgatgtacgatgttgctacccttcgtcaataggcataatgcttggattacgtctttaataaagacaaaatcacgcgtttgttcaccatcaccgaaaattgtaaattccgattggtgtttagctgcttgcgtgattaatgacaatacccctgaatacggtgatttaggattctgtcgtggtccataaacattgaagaaccgtaccgccactgttggaatattgtatagttttccataatcaattacaaaacgttcagttgcaaatttatcaattgcatacggtgtcaacggatcaattgttgagtcctcacgtttaggtaattcagaattatttccataaactgccgctgacgaagtaaacaacacttttttaacatttaatttattttgacgaattgtttctaagatgaaaatattcgcctcttgattgatttggtgggtttcatacggccgtgccaccgaatcggcaacactagcaatggccgctaataaatagatataatcaaaattctctttgagtaatagttcttgcataaagtcatggtcagtaatgctgtgttcgtaaaaggtcactttagatgagctaggaatgttactcgccaagcccattgataagtcatcaacaataacgacctcatcgccatcttgtattaactgatcaactaaatttgacccaataaaaccggcaccgccggtcactaaaactttacccaattatctttcctccaaattcaactattacctaaataaccaaaacttctttttttctttaacatggtggtactcactcggctctaagacatcgccgttaataatctttttggcgttgtcttgcatccaggtcaccatttccgccccattatgctgctccagcttagcgaacgccttctgcatccggaaattacggccctttaagttatgtgcgtcagaggcaaaaacaaagcctaagccggcatcaatgattcgctgcgtaaagtcttcgacctcagaaccaaatacgcctaagtagctgctggcggtgatctgggtcaagcaaccgctagccacaaaatcataaagcagatcgtgattcttttgaatgccgtgattgcgttcaggatggacgatcactggtgtgataccggctgcctgcagttcaaaaatcattttgtcggtgtattccggcacttcaccgtgggaaagctccaacatcaagtagcgattagtttcatcagcgaacaacacgtcatcatttttaatggcttgcattaagtcaccattgatatgtgcttcttgccctgggaagacaactaaatcgattttagcttcatccaacgctgcttgaaattctgcagtccgctgaatcacgtcagccttatgattggtatatttgccgtccatgtggtgtggcgtcaccaaaatatgactaataccgttatcgacagccactcgggccatcgctaaggcatcagccatggtatgcgccccatcatcacatcccggtaagatatgacaatgtagatcgatcatttcttatcgtccgttccgtaatacccaccgtagtaaccgccagaagctgcatctgtcacgcggttaagtacggcaccgatcaggttttttgagtaaatcgcgcgcccgtaaaacagcccctttaagagcgataccttgggggaccaccaagatcacgccgtcaaccttacttgctagaatttgtgcatcggtgaccctattaactggttgcacgcccagaacaattataccaaattgttccccaaattgcaagaacaaattagccacacgataaatcctattaaatcagtattttcattaatattcatattttatggacttaacttaaccggcggaagcagcggagaaaagctctttgggtgtttgatagccagtttgccggcgcggtaaaaggtttagttagttacttatttatcttctgtcccgtagtagccaccatagtagccacccgtattttctgctttaacccgattcatgatggtgcctaaaattcgtgcattaacgacttctaacaactcttttgccttggcaaccgaacccttttcaacaatcccttgtggtaccaccaaaattgtcccatcaactttgcttgccaaaatctgcgcatctgttactgaaataacgggtggtgtatcaaaaatcactaaatcaaagtgctttgtcaattctaaaattaatttatccattttctttgtatttaacaattcagacgggtttggtggtacgacaccacacggtaaaacgaatagatgatcaaccggtgttttttgaatcgcactatttaaatcgaaggtttcttccgttaatagtgatgttaagccttttttatttggcacttggaaagtttgatggactgttggacggcgcatatcggcatcgaccaataagacatctaccccttgatcagcccaggtcacggcaacattcgcacttaccgttgatttaccttgcgaagggcctgatgacgtgaagacaacactgcgcaacttttgatcgattgatgaaaattgaatattcgtgcggattgtccggaattgttccgcaataactgaagtcggatcagttaaagtaattaaaccgaccccttctttcatactatcttggtctagtttcttttcttttctaaataatcccattttcttaccctcttcttgataagcggctggtacttacgctcataatcgctttcttgattaaatctttttcagcaatattattaacaatccctagactagttaaccctaattcttccgttaaaaatccttcatcttttactgtcttgtccgttagttcacgtaaaaaggctatcccaactcccagtaatagacctaatacaactccaatcaaaacatatagattctttttgggagatactggatttaggttgggacttgcttgggaaataattgaaacattatcagttccactcataattttaggtgctttcttctgaaaagtctgtgctgttgtattcgcaatatctgcagcagtatacgcattatcagcctttacattaatggagaacacttgagagttttgattatttgcaatatcaatcatatttgcaatttgcccctcatttattttttcatcgttacctttattaatcttttcagcaacagtatccataataaccggtttcgtgattaaatctttatacgttgtaatcatttgaacatcagcttgaacttgattcagctgagcgccaacatcagtattttgtttacggttaactagcaactctgttgaagcgctatattgtggtgtaatcaaaaagaatgtcacgataacagctaataatgtacacaccactgtcgatgatagaattaaccggtgatacttacgtaaaataccgaaaatttgctcaatgttgattgtttgttccatgataccctccaaaagttaattaatgcttataactactttgcaacacgcgaaaagaagttaaccatcgctggttagcttcctcccgtgttattttaaatctaattgggttcttaaaagtctcgacatattcgccacttcagatgaactcatcacttggaaagattgtccgtcaatcatttgaccaattcccttcaattgatgcgtcttaaagttcattgcatccccataatttttctggatattaattgcatctttcaaggtaatattggtttgcatattattttctaagacttgtaaaaaattattataattcgtcaccatattcaatgaaaaagccttcttcaaaactgcttgtacgatagattgttggcgcaactgacgaccaaaatcacctctggagtcttcatggcgcattcgtgaaaatgccaatgcttcttcaccattcaaggatacgggccctacgctaaagtgatgtccatcttgtgtgaagtctaaatcattctcaacagtcaccccatcgaccgcatctactaattgttccaagcccttcatgttaaccagtacgtaataatcgaccggtacgttcaagaaggcttgcacggtattgactaccatcggaatgccaccgtaggcataagccgcgttaatcttagccgtttgaccgtaaccaacgattggcacccgtgaatcccgggcgatactcaacatgttggtttccttagtcgttggattgaccgttgcgagcatcattgtatcagtccggcctttttcggttcggcctagttcccctgtatctgtaccgagtaagaggatcgagaaaggcgtcttcttatttagttcgactttttctgaaactttgcgcttattttgtgtcttacctttggatttatacactgtcttggcggtttgattaacatccatatagaccttagctgcgaatgcgcccccggcaagaatcaataccccaagaacaactaaaatcacttttgttaatgtccaccctctgcgccggtgcttatggtgatggtgtcgcttctgttcttctgcagtcatccgtttcgtatcctcctcgaaaaataaacaaaaaaataatcaatcacattacatactatttacatactatttataatcataatattttctattgtagtataacttttattaaaaagaaatctttttctggagtacaccttaataaaaaacacttagttttcacactaaattgtgaataacccccttaacattgggcagtgattcaatattcaagatttttaaataattaaatatttttaaagtatcgaaagtgaaagtggtttacgaaatctaagtccatcaaaaaaccgatatgtaaaaacattagtttgacatatcggttgagataaataattttaattttagagactaaaaataggttgtaatcatccggttgattcccgaattcttacaacctatataattggttaacgtttcaattcatatttgtgctttgtctcattaatttttcggctgtcattcattttgatcgcgccgacgcgcaatgaagtcatgaaccttaccgcgactggcgttaacatgcccatgcagtgcttcttcaatcacaacattcaagacagccccaaccatcagaatcgttgcggaataattcagccacaagagtaagataatcaccgcaccgattgcaccgtaactattccatgacgtgccgaagtaacgaatatacaatgagaatgcttgtgcaagaattaaccagccaaccgttgtcagtgctgcccctggcagaacacttcgcaatcgcattttcacattcggaacgaagaaatagatgaaaatcagcagtaggaacaaggcaatccccgtcactggccattttaaactactaaaaatattaacgtaggtcttaggaatgttaaagattgggactaataattccaaaatttgttgcccgaatgtaaaaacaacaattaaaccgactaataatagaagtaataataatgtactccccaaagaaatcaggcgttttaaaacaaagttctgaactttttcaacacgatacgcgcggttaatactattttttaaggcattaatccccatgctcgctgcccacaacgtccccaagatcccgacggacaataagccatcattgcgtttcttcaatagggactgcagaactggcataatcttgtcgaatatcgtgggcggcaccgccgtttggacgtaatccgccacactcattacatctaactggaagtacggtaagatgttcccgataacgattaatagtgggaagattgataataacgaataatatgcgattaccttcgaattatcactaatgcttgcttctgatgaacgcaacatcattaacttcaccacagcaatcaacttctgccgtctggataagtcctgttttaccaccggtaactggttttgattgtctactgtcatatgtcactccaaattctcttttacacattagtcgttctacctgaaaggcttattttcccgacttcttaaggcatgtttatcatttctattatacacgaattaactatgggctaatagttttctgaaagcaaaaaaaaaaaccttctcattttagagaaggtttctaattttatagtaaatatttagcatccatttctggatcttgtgaggttagaatcttaggaccatctttggtaatcgcaattgtgtgttcatattgcgcacatggtgtgccatctgctgagacgtaatattcccagtcttcgccagggacttcttttgacttgatgtgccatgtgccacctaagatgaccattggttcaattgtgatggtcatcccttctttaaggcgcaagcccttgcccgcttcaccgtatgaaggcacgtttggttgttcgtgcatcgttggttgaataccatgtccaatcaattcacggacgtcaccgtagctgttttcaacttcggtatattgttggatggcgtggccgatatcacctaggcgattgccgacaacggcttgatcaatgcctaagtagagtgctttgcgcgtatcgtccattaatttttgtaattctggtgcgatttcgccaaccgcataagtccagcaagaatcactttcataaccgtccaagttaacggtcatgtcgacactgacaatgtcgccttcttttagaattaagttcttccgtggaatggcatgtgccacttcctcattcacgcagacacaagttgcgtacttgtagccttcaaagcctttttcagatgctttggcaccgtgttgttcgatgtagtcgtttgcgaattcttcaattacccagctcgaaatacctggtttgatgatgtcgcgcaaaccgcgatgaacgccggcaataatggcgccagaagcagccatccctttaatttctcgttcagattttaatgtaatcaaaatgaaacctccaatattgttaccattgtagcctttaattgtatctatttctatattatacgctatctgccattaaaatggacgaatcgtcgctttttagttcaattaaccgtgaaagagccgttgcaccttttcttaataaggggcttttgctataatgccttatagtataattcgttaattgcggccactgagcgccgcgtacgtgaaaggatgtcccaataatggcaactgctaaagtagtctatgcaagtatgaccggcaataacgaggaaattgccgaaatcgttgaagaagccctcgaaagtttgaacgtcgacgttgaaaccactgaaatctctcaagcagatcctgccgattttgaagacagcgatatctgtatcgtctgcagctacacctatggcgatgatggcgatctccccgatgaagccgttgatttctacgaagatctcaaggatattgatttaactggtaaagtctacggtgtctgtggctccggtgatacgttctacgatgacttctgtaaagtggttgatgatttcgcagccgtcttcgaacaaaccggcgcaacaaagggttcagacgttgtcaaagtcgatctatcagcagaagcagaagatatcgaacatcttgaaaaattcgtatcagagattgtcgcaaaacagagtgcgtcataagctcggtcagtatccgagcactaacctagtctggcacaggatactagcttataaagcacgtttcaaggcagagtgcgtttgaaacggttatgctttgagcattaactggatttgccgaataggtgatgcaatcacctatttggtaaatttggttaagggcagaagtatgtttcaacaagcacgtttcaaccaatcttccctgggccgcggttacgtccctttttaccgcggcccttcttttggtcttttagaccttaataaatcaaactaggagctgtctttatggctttcattaaacggttagtgtttaaataccgcgattttttgacctatacgatttttggttttttagcatcgttggttaatatttttacttactgggtatttcgccacaccattatttggccgtatttactcgccaatacaatggcgtggtttgtcgcgaatttatttggcttttttaccaataagtcgcttgtattccaatccaaatacaccacgtttggcgctgtgtgtcgtgaagtgctttcgtttttctttttccgtggtgtatcctttttcttggataacggtttgatgattgtcgccatctccttcttagggtggcagagtatgaccgccaagattatcgatcagttaatcgtcggcattgtcaactacatcaccacccgctacactttcaaaaaaacagaacaacaaatggcactccggggtcggattctccggcgatacaatgctattttgaaaagaggtcacaatgattaaagccattcaacaactcattcaaaaatactgggaacaattaatgtacttggtctttggtgtcttaacaaccctagtcaacatggtcgttttcttcggattagaccactatacaactatcaattatctcgtcagcaacacgattgcctggttcttatccgtgctatttgcctttttcaccaataaaacgtgggtctttcagtcaaaatatacaactttaaaggacttttcccgcgaaatggctagtttctttttcttccgtggtatatcatttataatggatactgcaattatgtttgttgggatttccttattggtatggcccaacatgcttgttaaagtgctagatcagattatcgtgattttagcgaactatgtatttagcaaatggattttcaaagatacttcggaggattaagatgactaagacgatttcaattattgtaccctgttataacgagcaagaatcaattccgcttttctacgcagcagttgagaaagtagcggctactctagccgaccaccgcatcgaatacatcttcgttaacgatggttctgctgatgaaagcctggcggaaatgcgcgcgttacaggcacaagaccctgaacacgttcactacatttcattctctcggaacttcggtaaagaggctgccttgtatgctggcttacaagccgcaactggcgactacgtttcagtgatggatgttgacttacaagatccgcctgaactattacccgaaatgattcacggcattgaagtcgaaggttatgactgtgtcggcactcgccggacaacacgtgcgggtgaaccccccgttcgttcgttcttcgctaaacaattttacaagattatcaaccggatttcacaaactgaaatcgtggatggtgctcgtgattatcgcttgatgactcggcagatggtcaatgccatcttagagatgtctgaatataaccgtttttcaaaagggattttcagttgggtcggctttgacaccaagtacttagaatataagaaccaagaccgcgttgctggtcaaaccagttggtcattctggggactcttcaaatattcattggatgggattgtaactttctcagaaacaccattagccattgcgtccttcgtcggctttttctcattcgcgattgccctgcttgcattaatcttcatcgttattcgtgcttttatttttggcgatccaacaagcggttggccatcactcatttcagttatcctaatggtcggcggtttacaactcctatgcctagggattgtcggcaaatacatcggcaaaatctacctagaagttaaaaacagaccagtgtatattgtgaaagaaaagaaataaagtgcgtttggttgcacttagcaactgagtattaagacaaaaaacagtttgaatccgcacgtttatctcatcaaaaaaagccctcgccattatcagtcaaaatgataatggtcgagggctttttcaatgctcattatttaaacgcttctggtttttcttttgattgaccaaaatgataagcaattgcatctaaaatccgttgagatgcttgtccatcaccatatggattcttggcatgggccattgcttcatatacggcttgatcatctaataattcaaccatggcatcatgaacttgttctggttgtgtcccaaccaacttcaacgtgcctgcttcaaccccttcaggtcgttcagttgtatcccgtaagaccaacacaggtttgcctaatgacggtgcttcttcttgcacaccaccagaatcagacatgatgaagaaactccgtgcagctaagttgtggaaatcaacaacatccaatggatcaattaaatgaatccgtgggtgattgcctaagatatcttgcgctgcttcttgcacaacagggttcaaatgcactggataaacgatttcaacatcatcatgggtttcaacaacttggcgcattaccttgaagacccgtttcattggttcaccttggttttcacgtcgatgcattgttactagaatcattcgtttgtcagcatcaacaacatccaagattgaatgattgtagtcgctttgaaccgtttgtttcaatgcatcaattgctgtattccctgtaatgtaaatagccttttgtgggtgattttcttgtaataagttggcttcacttttactggttggtgcaaaataaagatcactgagtacatctgttaattggcgattcatttcttctgggaatggtgaatacttatcccaagttcttagtcctgcttcaacatggccaatcgctgtttgattgtagaatgcactaatgcttgctgcgaaagtagtggttgtatccccatggactaatacgatatccggtttttcagttgcaatcactttatcaaggttcattaatacgttgctagtaatttcactaagtgtttgtcgttgtttcataacgtccaaatcgtaatctggtttaattttaaaaatttcaagcacttgatctaacatttgacgatgttgggcagttaccaccgtcacagcttcgaattcatctgagcgttctttcaatgctaatactagcggcgccatcttaattgcttctggtcgtgtcccaaaaacagtcattactttaattttagacacaaatttgcctcctaccatttaataagttaacacctcctatattacacgttttataagggtttgccaatccattgcagtcttattcccttgagtcaaatgaataacagtctgaatattaaaaaggacgcctttttaggcgtctctttttaataacattgcttcaacattcgcttgagcatcgcgtctatttctgcgtcactatagtgtaccaacttcgcattcgttaaggtcgccaaacccgtaataatgatccacgcttcgttaataatgcgttcgtgttctgactcactaaccgtttttaacggttgatagtcctccaatctagtttgtgtcaattgccccatgaaaagttgtgcttcatccttaccaaagtggttatcaataaataacgcacggtaaagttctggttcgattgtagcaaaatgaatatagccaatcccgagattgactaaggcatcatctgttcgttgttcttcactgacataccacaccaaacgcgccttggcttgttccaaaatggcttgcttgagattggccatattaccgaattctaaatagatgggttgtgtcgaacagtctagtgccttggcaaggctgcgcgctgtaattgcttttaaaccatccgctaataccatttcgtatgctttatccagaatttgctccgctttaatccgttttgtccgtgccatcgttcccactccttaaccgatcaatccgtttttcaatattatctactgtcactctaccacaaaattaaataacatgaaaacgtttttatctattttacgagttttttaaatcgccatgtgctatgataaacatattaaatcgcccttaaggaggaatttttgatgactactttccaacataatcttgaaaaatacgctgctttagtcgctaaaacaggaattaacgtccaacctggtgatacagtggttttacaaatcgctgttgatcaagctgaactagcccgtgatatgacagctgcttgctacgatctcggagcagcagaagtgattatcaaatggcaagatgatgacatcgatcggatcaatatgcaacacaaagccgaagatcgcctcgttaacgtgccagacttccagaaacaagaatacgattactggttagcaaataacgccaaacggatttcggtgatgtcgagcaatcctgataaccttaagggcctcgatggtgatcgggtcgctgctgttcaaaaggcaaacggtcaagcaatgcttaaagttcgccaagcaacacaagccaacaaaaatagttggattgtaattgccgcagctagtcccgcttgggcaaagaaagtctttcctgatatggacgaacaagccgcaactgataagttatggacagagattttcaaaacaacccgggtagataaagaagacccaatccttgcttgggaacaacatggcaagaaactgcaagccaaagccgctgaattaaacgctgcgcaatacaaagcactccattacacagctcctggcactgatctcacaattgggttacctgaaaaccacatctggatgggtggtcctagccgtagtagtgatggtcgttcattcgtcgctaacatgcctactgaggaagttttctcagcagctgatgccaacaacgtcgatggctacatttcttctacgaaaccattgagttacgctggtaacacactcaataacatgcaatttacttttgaaaacggcaaagtggtcaaagccaccgctgaagaaggcaacgatgtcttacaaaaactcttacaaaccgatgctggggtcaagagcctaggtgaagtcgcacttgtaccagatccttcaccaatttcacaatcaaagatcaccttctacaataccttatttgacgaaaatgcttcaaaccatttggcactcggctctgcttacgccttttcaattgaaggcggcacagatatgtctgaagaggaattaaaagcagctggtttaaaccgtagtcaagcccacgttgacttcatggtcggttccagtcaaatgaacatcgatggcttaacacacgacggtcagattgtccccattttcagaaacggtgactgggctgactaatgattacatggctcatgctccttggcgtctgcgtttgtctaaccaccttcttcattggactaaccgcctatagcgcctaccagaaacaagcgattggtggtctaatcattgtgtgcgttgccggtttagtcttaaccgcaatcgcggcattcttctactaccaagcactgacgcatttataattcgaaagggtcacgacaaaatttttgttgcgaccctttttgatgtgctagactgttggcatactttttgttcactatatcattattcgttagtaataatgattcgtatgtactggtataacaggttttatacaatgtttttgttgtgaacaattgctcaaaaacaattgataatccttctcaattagctataatgaagttaaatcaaccagaggagtccgccattatgaaagaattatccgccagtgcaccacttgaacatcgtttccatttatcagaacgtttgaacattatccgcgccggcgttttaggggcaaatgacggcattatctctgtagctggaatcgtagtgggtgtcgcgagcgcccaccaaagtcagtacacgatttttcttgctggtatttctggcatgcttgctggcgccttttcaatgggtggcggtgaatacgtctcggtcagcacgcaacgtgacacgcagaaatccatgatgcggcttcaaaaagaagccatccaaaacgaatacgctgctgaagtggccagtctacaacggacttacgaatcaaaaggcttacccactccacttgcacatcaggtagcttcagcgttcatgcaaaaagacagtcttgacatcacactccgcgaaaaatacaatattgaattacaccattacttcaacccgtggcatgccgccttttcatcatttttctcattcatgttaggctcattgctgccaatcatcgccatcctagcaattccatacccttacaaagtcagtggaactattggttcaattgtccttgcccttatcgcgaccggttacacgagtgcaacgttaggcaaggcaaaccgactcaaaggtgttttacgcaacgtcttaaccggcgtcttaaccatggtcgtcacctatttaattggtggttctatcggctaagcttcacttttaacctaaaatttgctatgctatatttaatttaatcgtcgccacggggcagttaatcacttcattaggtcaaagaagaagtgattggctgtcctttttttgtggccgatattattaggaggttctattgtgtggcatgggttgatttattgattgcaggattggcagaagtttggtgggcaacgactatgaagatgagtggtgggttcactaagctcaattacacattactgacgattgctggcatgctcgtcagcttcggttttctaattcgtgcgacgaagggattaccattgagcattgcttatccggtttggaccggaattggcgcagtgggagctattttagtcggcatcatcttattcaatgaacacatttctttattaacctggctattcgttattttattagtaatcggaattctcggcattaaaatgacgagtggtcattaaaaaataggcttacccattttgggtaagccttatttattaacgtgttctaattgccaactcgcgatagtttgaatcaactcgattggtaatgccgttacatctttttcgaattgtagtgtccctttgccggtctgacatggtgcgacagcttttgcaaaatgggccatcggttgattagtgggataaaacccgatgtgccgtttattaatgccaaaatagcaaactgctttaggctgataatacccaaccaaaccataagccagcttcatctctgcgtccggtaacactgcccaaagaatggtgtgcattgccagtgcgagtgttcgatcagcatcagttgtaaggcctgcattatattgctcaataactgtcatcttatccccacctttattttgctctcattctagcatgaaaccacaaaaaaagcccaaccgaagttggactcttgaaaaacaataattatttaacagctggtgtaccgaaccattcgatacgtgattcaactgtgtctttgattgcttttgtacctggtgcaagaactttacgaggatcgaagcctttttcagcttgatctttgttttctgcatagtattctttaacagcgtttgaccatgcgatttgttgttctgtattaacgttaacttttgagatacccatttcgattgctttaaggatttgttccttaggaatacctgaaccaccatgtaatacaagtggtaagtcaatagcgtcagctaattcttgtaaacggtcaaagcttaaaccttgccagttttcagggtatacaccatgaatattaccaataccaactgctaagtagtcaggaccagcagctgctaattgtttagcttcttcaacgtcagctaattcgccagcaccgatgataccgtcttcttcgccaccaattgaaccaacttcggcttcaactgagatgcctttagcatgtgctaaagcaacgatttcttttgtctttgctaagttttcttcgaatggtaaatcatgaccatcgaacataactgagttgtaaccaacttcgatacattctttagcagcttcgtagttaccgtgatctaaatgcatgataacaggaactgtgatgttcattgacttgattgtttgttcaaccaagttcttgcataattcgtaaccacccatatatttagcagcacccattgatgtttggatcaagattggtgtgttagtttcttgagcagcacctaagatagcacgtgtccattcaaggttgtttgtgttgaaagcaccaacagcgtaatgaccttcacgagcagctttaaagatttctgtaccattaactaatgacatgaaaaagcctccagattaattgcaacttttgcgttgcgatttttgaatacgaatctattttaacatattttgacctaatataaatcataaatccgtaactttctgaaagtgaaagcgtaatcattctgcttgattattttacaccaattaaaaagcacactagttaatctagtgtgcttttacgacaattgcttcaaagtgcgcccggcgagaatcgaactcgcaacctatcgcttaggaggcgattgctctatccagttgagccacgagcgcctatgagtcatattgtcgcatctgttgttttaattgtaaagttgattttaataaatctttattcatccgttaaaacggcgttcatcgtttcttgacctaaaaagaacacggcaccagccgctaatagtatcgcacccgtaaaaagtgtaaaaatcacggctactgataccccctgctgaattagcgcaccaactaaaaatggcccaaccacaccgccaattcgcccgatgccagctgctaaaccactcccacttccacggacaagtgcaggatattgttctggggtataagcatatagcgccccccatgcaccaagattgaaaaaggataacagcgcaccggccacgagtaacatggcaactgagtttgcattgccaaacaataatgcactgagtgctgttccgattagaaagccacctaaaacacgtttccgcccccatttttcaatcaaccacgctgctacaaagtagcctggtaattgtgccaaggtcataatcagcacatattcaaaacttttaaccaagctgaacccttttaagaccatcacactggggagccataaaaacatcccatagtatgaaaagaccactaaaaaccatacgagccataacataattgttctttggcgatacgctggttcaaataaaacacgcaatcgttgcatgaatggtaccttacggttaatcgtcgtcggttcatgctcttgtttaacatgtttccgtaacacaagtgtgtagatggcgggcaatgacgtgatcaataagaccactcgccagccccaaactggaatgacaaaataggcgagtaaactggcaactaaccacccggctgcccaaaaactttctaacaatacgacagcccgaccgcgcgatgccgttggcgtattctccgagattaatgtcgaggctaccggtagctcgccacccaacccagcaccgaccaataaccggagtactagaaatagactcaacgatgtactaaaggcagatatcccattgccaatcgaaaatactaataaggaacaaagtaaactgttttttcgaccaattttatcagctaaaatgccgaaaatagcggcgccaaaaaccattccaattgaactgacactcccaattaatcccatttgtgcactactgagttgccactctcttgcaagcgcagcaatcacaaacgatagcatccccacatccattgcatcgaacaaccatgcaccacctgcagcccataaaagtgtcctatgttcttttgtcatcccgcattactcccttatgttatgaatggtcctatcatacaaaaagagtttacagatgtcaagacacctaattatgcattataataaatatttatctgtttaagcgctgcgacaatttgcttaaatcgttgttctgacgcgcattcaatcgtgtgtaaatgaatgccgtcggttaatgttgaaagtaatttctgatggggcattgtggccattttttgcataaagcctttgacatctgtcaaggtgccgattcccagttgaccggtcagttcaccatacaatggatgatcaacggtcacgtcgatcacgcgccccccattttcaacaatcgttgtcaattcaagttcagtctgcccctgattatgctgacaggcaacttgtgcctgatatggcattgtttgttgcgtctgcgtttggtcgtaataaccgctaactgtcgcaataatttgggccccttgtgcgcgaagtaaggcgatatccccaacaattgtctgccggctaactttatattgttgcgctaatactttggcactgatgggttgcgcactcttttgaattgcattcagaattgctgtacgtcgttcttgcgttgtcatattgccacctcgtcttgatttcttacgctatattctaagcgttctaaaggcaaaaagaaagtggagggttgaaacgaactcgtttttccggttaacctaaaaatacatattatggcttaaacccgccataatatgtatttttctgttaatcctcaaagccaacccgttcgactacgcactcttgttttaaacgtgctgcctcgaactgccttttccggttaacctaaaaatacatactatggcttaaacccgccataatatgtatttttctgttaatcctcaaagccaacccgttcgactacgcactcttgttttaaacgtgctgcctcgaactgccttttccggttaacctaaaaatacatactatggcttaaacccgccataatatgtatttttctgttaatcctcaaagccaacccgttcgactacgcactctatagtatttccccgttgcttttaatgactttttggtaccagtagaaactgtcttttggatagcggtttagttctctttcttctgtttcgtcgcgatccacgtagacgaagccatagcgtttttgatagccgtttgtccaacttaataaatctgtgaagctccatgtcgtgtaaccgatgaccgaaacaccatcggtaatagcttcgtgaatggcttgaacgtgcgcctttaaaaaggcaatccggtagtcgtcgtgcacttgcccgccttctttcaaggtgtcataagcccctaaaccgttctcagtaattaagaccggcagtccataacggctctcaatacgtctgagtgcgattcgaagtccttcggggtcaatattccaatcccagtcagtttgttgcatataggggttatcagcggtcttgtagacgcctggcaacccacttgcttggctagtgccctttttaccggaagtattttgcttggtcaaaccaacgccaccttctagtgggttagtcgtaaccgtcatcgtctgatagtaattcaaccccataaaatcgggatgtgcgagtggatcggctaataaagcttggtccgcttcagtaatttcgggtgcaatcccgtttcgttcgagataagtcatcactaatttcggataacggccccaagcataaacgtccatccacaaatcagcgttaatttgttcggcattatcagccgcaatttgattttctgggtccgcattcagcgcataagttgggctgtaggcaaaactaggtccgatgcccccttgatagcctttttcatggaataatttaatcgcactagcattggcaaggtttgccatatgattagcttgataagttcgcttagcatcagtcactgctggcggatgctccgctgttaaatagccgtgagtgatgaagacattttgttcgttcaaggtaacccaatgttgcacacgatcgccgaagcgttcgaacaataagcctgcgtagttggtaaaatcttcaataatttgacgcgattcccaaccgccatattcggcttgcaacgcttgcggtaagtcccaatgataaattgtcacgattggttcaatatcattggcaattaatgtattaattaaacgatcataaaaggctaagcccgcctcattcacagcgcctttaccatttggtaagacccgtggccatgaaatcgaaaaacgataggctttgagcccagcgcgtgccattagcgccacgtcttcttcgaaacggtgatagtgatccaccgctacatcaccattcgtggctttgaacgttttgcctggaatgcggacaaattcatcccacacagaacggcccttaccatcttcttggtaggccccttcaatttgataggccgcagaagctgaaccccacaaaaaatctttaggaaatggtgctaattgatggtattccattactggtcatcctactttctctcaaagtcattgcttattgttctgcttgatatgctttttcgatttgtttcaacattttcttaaagccgcgtttacgcatgaaacccatgacaaaggccatcaacatatcattggtttgttgtaatttgccatttgctttggcattttcgcgatagatgacttcaatagactgcggtccattcgcgaaaatatcgtaacttgattgatagctcccccgggtagaagtcgtttcgtagtgatagctctgatctttaatcagttgcgtaatcttcagtgtcgcccgattcttgccaaattgcttgtcgtacgaataattaggcaactgcgcttcagttagtttatccccagtttgttgcttaatatcaaacaacactgattccagaatcttctgataaaaataactagctggcatttttaaatttaatttaatttccatcccgttcccactcttctcttcaatgtgccatttgttgcttttaactaaaaagagctcgaacaaaagtcattttgtcctagcccttttgttcattagccaaactttaatcgactggtacaccggccatcttcttgtaaacgtcaacgacttcgcctgctaaatcgcggaaagtaattgcgttcatcaagtgatcttgtgagtgaaccgtcaataatgtcacttgcatgtgatcgccacttgcttctttggttaacatatctgtttgtgaattatgggcttctgataaagcagcatccgcttctgcaagtttggcagctgctgtttcgaagtcacctttcttagcggccatgattgcttccattgagctactcttggcgttcccaccgttgataattaagcccatgattgcttctaagttctgttcttctgccatagtatggcacctcctatgatcatctcatcgtgaaccactttcgtaaccattcattaattggtctagatatttcttcgagaatgactaaccaatccattaaaaggctttcaaaaattagttcctgattgtgagagttcgccactatcgcattttacgaagcgaaagaaaacccttacttatattgtaatcgcttcctgagatttgtcaattaattactgataaccttttcacaaacggactagtccaaaaaaaagaaaccttaacaggttgttaaggtttctcgctcaatctggattagaccactagtcattatttttcttatggtagcccttattcttttgatttcgtttacgatttttcttatgttttggttttaatggtgcagctggctgttggcgaactggtactaatttggctttgcgcgcgcttgtcgtcggcgtagccttttgtacttgtccttctgttgcttcaccagtagttggtacagcagatgttgctttcgttgcagcaactggtgctactttaggcgtcactggtttttcggcttccaaatggtcaccgaccaaataacgggtcacaagatcatattcaggcgccaataacttacgcaaattccgcccatcgtgttgattgcccaacgtcaaaacagtccccgtgcgtcccatccgaccagtccgaccagcacgatgaatgtaagtgatttttgcgtttggtacatcaaaattaatcacataaggtaagtcggtgatatccaagccacggccagccacgtccgttgctagtaagagttgaatcttaccttcacggaaatctttgagcgctttttggcgttctgtttggcgaccttgccctgagagtgcggcatacgttactttttgatgttttaacgtttgtgcagcttgtaagagttgcgcggattggttaaaaatgaccaatcctctaaaattcttttgatgtgctaaatggcgtaagacgttcactttttgagcgttaccagttgggataaatgcatgcaacacttccccacccgtcttatcaatcccacgcacgtcgattgtttcgattggcacgccgaaccatgtttccaactctaataagatatcggttgatgtcgctgaaaagaagccaagttgcacatcggcaggtgattcttgcacgatatggcgggtttctgaaagcccgctatccgtcaataattcgtcagcttcgtccataataatcgcttggagtgtatggaatttcactttccgttgttcgctcaattctaataaccgaccagtcgttgccacgataatctctggtttggccttaagccgttcgatttggcgtttaacattcgccttccccgtaatcgcttggacattacagtcgattgccttggcataaggttgaatgacgtcccgtgtttggatcaccaattcctgtgaaggggccaaaattaagacttgtagcccttcgcccggcataattttttctaataacggcaatgaaaacgcgagggttttcccagaacccgtgggtgccagtcctagaattgattggtcttttttcagtggttgataaactgcctcttggatgggtgacatttctgtaaatccttgttcatcccatagtgcttgaaatagtggtgaaacgctcatgtattgcctccgtcatgttaatctgcatcaaatgttattccggccgactgtcttaattgatataaaacttggttgaccgattcacttagctgtaataattcatgataccgttttgtgtcacgattagcaatcatcgccgcgaaattttctgcctcagcaaccattggattagcaagtgattgttcccctagtgactcaatcttttgcccaccttcgctgtagcggtcaacactgccgattgtgccggcattatcgaggacaatcgtcgtttggccaccataaatttcagacgttagataggaatcaacggttttgccaaaaatcaacgtgacgttaaaggttggataacacagtgttgcgacccctttaccatccactccagttggtaacaattcagcttgataatcgactgaatcgggcacaccaaaccagctgacggcatcatagacgacatacacgccgagatcttgtaaagctcctccagaaaaatgtggtgagaaaatattcggttcttcacccgctaaaacagcgtcatagcgtgatgaatatttcatatagctcaaggtcgcgccattgatcgccggtaatgcgttgatggcttgttgtacaatcttaaagttggcctcatgaatatgacgtgctgcttcgaataagaattggtctggatgttgctttaataatgtttgcatggctgccatttcagccggattactgaaggcaggtttttccacgatgacatttttacccgctaaaattgcttgcttcgcttgttcaaagtgcagactattaggtgatgcaatgtagacggtttcaaattcattggcattcataaacccgtctaagtcagtgtaacttgtggcttctggtgcgtgatacttcgttttaaattggtcggctttatctgccgtccgtgaataaacagctgttaacttaaatgattcagattcctgggccgcatcaacaaattgtcccgtaatccagttagtcccaataatcccaagtgtttgcattataatcagctcccttatttaatactgccagtatacgggatttagatctaaaagcctatcgaaaagtttttctactgataagaattccgccactattcacttctttaaccattccttaaaaaaccagtcgtaagtccgataattaattgtccgcaaactaactatttcgtggtagaataatagtaagttggggtgtgacttatgcgattttttaaatttcaaaaaccacaagcaattttaaatcgaaccattcaccagtatcagcaaaaagttcggacgactcaagcgagtaaagtagcgactttttatgctggacactggtcttttaatgacaaccaaacccgaaaaaaacacacattagaaattacaccgaacttgttggtgcaaatcgatcataagccattgagtggtcaagtcatttccctcacggaaaacgaattggtctttctcgatcactacggctatcaattaaaaattacttgtgaaaatcaacggcccgtttcaatttacgatgaagccgaagatatggattatccaatcgaatagctattaaaaaaggcccataacgcttagcgttatgggcctttttagttattctttatttgttcaacattttttgagctttatctgggacttcgtttttggcaaccttttcccatgaaaccacacccttatttttattgacgattaatttgaggtacgcatttcgtttaagcggcgttgatttgttaccattaaaatcaacttttttggtaacaccatcttcattgtaggctgcttgttgatagttataatcgataaccgtttcccctgctgaatccttttcttccattcgtgttccgtttgaaacaatctgtgtatagtaggcttccccaccgtaataatagctatgaattccccaactaccaccgatgaaaaccaccacgattgcgattaataataaccagcctttgtgtttaatcattattttctctccgtttctatttaatagtctgccattgttgcttggtgccagtaaaaactgctaactgatagttcgtctgattatcactgtttggaatctgactagccattgtgtattgccagaacccgttcttagtcgccaatgttggctgttcccgcgtagtttgccacaatggatagtctcctttgtgtggcacataccgttttaataagctgggtgcaccaccaatgagacaattttgatgataatgttgattaatcaaggtcactagctgcgccagtgccatttgcgttttcttttgtgcgggcggttgttgtgcatagtcgttataataatccaaatagatcataattggtaaatcacccgtctggctgccaactgctttaaaaagttggtcagcttggcgttcaggcgaactatcaaaactaaaaaaatgaaagatgcccacgcgtaagccagtgccacttgctcgactgtaattggtgtcgaaattatcatccttgtaactggccccttcagttgcttttaaataaacaaactgaataccgtccttttttaacccgtcaaaatcttggtaaccatctgactgacttaattgcatccctagaatcggatattgcgtcgcgcttggtcgatccgaacggtgtttcaaccaccagatagcaccaccaagacacagagctaccgcgataatgccgataattatttgtcgccaatagcgcttttggaaactgtcttgaaaaatcggcgtcacttttcgtctcatccacggttcctccatttccagccttagtacgcttagtttactatcttcatgcattcgagacaagccacctaacaattttgttcgttactgtcacttagagttgccttttattggtaatcagatacaatgtgaacaaagggaggcggaatatgttagatgaacgcttagtggggttaacgtttactttacaggatgctaaatcaaccggcaccgttaatttttttggcatcttatatcattaccgtgtcgaaggaccagctagcgctggcttactcgtcatggtaacggccgtcacacctttagctttaatcgtgacagcgcaccacaatattctggcgtattaagccagacaaaagggagtttttattatgggtattttcatcagtattttagtcattcttgttttagttattgttgcagtcaccctcttttcatcatttgccttgattcataccggggaagttgggattttggaacgcttaggggtctacgttaaaacgcttgatcctggtttccatttggtcattccattcatttatcacatcacagaaatcgttaatatgaaacaaatccccttaaaagtcgctgaacaagaagtcattaccaaagacaacgtggttgttatgatttcggaaacgattaaatatcacatcactgacgtcaatgcgtacgtttataaaaataaagattccgttctaagtatggtccaagacacccgtgcacaattacgtgggattattgggaacatggacttgaacgatgttttaaatggcaccgaaaaaattaaccaaaccctttttgaacaacttagcgaagtaacagccggctacggcttaaacgttgatcgggtcaatatcgattcaattcaagtggcccacgacatccaagaatcaatgaataaattgctccgtgcttcgcgtgaaaaagaagccaacattatggaagccgaagggctcaaagccgccgcaattcgtaaagctgaaggattaaaagaagcgaatattctagaagccgaagccaataaacaaacacaaattttggaagctgaagggaaagctcaaagtgaacgaacaattgccgaagctgttaaagatcaaattaatttgatcaatgccagcttagtcaataacggcgaactctatcttcaatataagaatattgaagcgatggaacacatcgcagacggtcaaaataacaccattgtcttgccaaataagtcaatcgatagcttgggtaatttgccagcaattggtgctctggttcaaaaagaaagtaccaagcattctaattaatgaatgccaataaaaaaggccccagaataacaaccttactgttattctggggctttttttattggtcctctgaaggtgttgaatccttaggtgttggttgtgtattgcgggtgttctttttgctgagaatgtattgttctaacaaggccacaatctgttgattctgtggtagatcagagtgttgtgcttggtcacctgtcaccgtaatttcggtgtagtgcttgacttgcccttgataaatgtacttccccgcctctacactacgcgcgggtacaatcccatcattttcaaagttttccgttcccgcaattgaatacatcgataagttcgtcggaatatttttacgtttcttaatgaaatccgtcagcatctgtgacttatgcgtaatcgatgtttcggaaaagttatacggcgaaccaatcgtcatcaacttcttcactgtaatatcatcgcgattaaaataatcttctaaaaaagctgtataaattaagccgccattagaatggccaaccgctttaaagttattaaattgatacttcttagtcaacgcggtaaatgcgagcgaaaaccatttagcttgcttttgaatattactataaccgtccttattgttttcaaaaccaaccacgataaacggttcattatcccgcggtttaatttcccctgaatagctaatctgattattttcatgcacagttagttttaacaagctgtgccgattcccgcggttagcgttcaatttagccactaattcatcaaaccgattttgggttgcactactccctggaataaaaattaccggtgacattcgtgaatcatggcgcttagctaaggtcatcacgctctggcgactccattgagcagctggccacattaatccgccgatcaaggccaaactaatgactaacaaccagaggcttttttttcttaatttggccaatttatgccgcctcctttacgagtgctaattgatctgccaattggacaaacggcttgtagatcatcacgccgacgacaacgtttaataccgtcaccgccagcgcgactaaatcaccgttggtgcccatgaacgcttgcaataagccgggggtcccaagtggaaccgtgaagactaccgacggcatgagattcaatgcaactgctgccgatgcaatccccatgtttaccagtggtaccaataagaatggaatcacatacaagccatttccaatgacaggcattcccacaaggaccgcgctattaaagttaaataaaacgggcaacaacgaccatcgaccaatcaaatgataatccctttgtttgctgaagatgaaaacggcaatcactaaggctaatgtcccacccgtcccgccaatcgcaccaaagggttcatacaaagtccctaacgtgaacggatatggaacgtgccaagccgtgtgatgactaaacgcatagtttaagttggccgaagatgcgattccctcacgcccaaattgggccaatgttggcatactcgttaatccaaaaaaagttaagctagtggccgctaaaccagtccccaacgtgaaaagcagacccgtttgatttgcttttagtgattgtaatcgtaagatgacttgatctggcaagattgaaatcgccaaccaatttagcaggatactcagccctaaaatgacgccgagcaccaataaaatcgcccacatagaatccaatgaacgtcctaccgctgacccattcagcggtaaatcgcgccgatgaggtcgtcctaattttttgaaggctaatccagtcagatagccgactaataggccaaaaaataagccccccattcccaacatctggctgttgaaagataagccctcatttggcgtcaaccgtaacgctaagattaaataggcaataagccccgtaatgctggctaattgttcatcacgcttatagtgcttggctgtatagcgcgccgcacacatcgctgctaatgccgcaacgattcctaacgtcaaactcgtaatgctgtcaaacatcatctgaaagatattccgtttactcaaccaattcgaaagatgaaatacattcacaacaaaactattccggttaaaaagtgctagttggatgagttggctgatactcccaatcaagacaaatggaaataacaacattaaacttcgctgcataatctgatagaccgccgcggattggaatcgattaaaatgttgcgctaagcgcatcattatagattgttttttgacattcatgcgttaaccctctaaacatgttttgataatttcattctagccgaccttccgcttaaatgcacgtctgaacgcaaaaaacgggtcgctactttccatctctggataataacgacccgctaaaacgtgctttttgtggcaacttcttccgtctagctacgtctgtcaaatcaccaacttgttggttattcgccagcctaggctatactcagaagttaaccgccacaaacgcactctattttgaaacgtgctttttgtggcaacttcttccgtctagctacgtctgtcaaatcaccaacttgttggttattcgccagcctaggctatactcagaagttaaccgccacaaacgcactttattttaatactaatttagtgacactttcgacgtgtagcgtttgtgggaacatgtcgactggttgtgtgctttctgcttggtagccttgggctgccaatagttctaaatcacgcgccaatgttgctggattacagctgacatagaccatcttggctggttttaattgaccaacggcttcaatgaagctagtttccaaccctttacgtggtgggtcaacaatcaaagcatcgacttttaagtcatctgcttgccattgcgccatcacttcttcggctttaccgagtgtaaattcaacgttttcgatgccgttaatcttggcattgtgccgcgcatccataacagctgattcaacaacttcaacaccgtaaacttgcttagcatgtttagcgactgctaatgaaatcgtcccaatccctgaataagcatcaatgactgtttcgttccccgttaattcagcagcttcgatcgccttgttatacaagacttccgtttgcactgggttcacttggtagaatgattgcgctgaaatttcgaacttcaagcccattaattcatcacgaataaagtcgcggccagcgattaattttgtttcgtcaccaaagatgacgttcgtttgagcagcattgacgttttgcatgatgctgaccacttctggtaaagcttttttgatttcaacggcgatttcacgggcagccggtaatttcttactccgcgtgatgaagacaatcatcatttcgtggctgtaataaccgcggcgaaccataatggtcttcaaaacacccttatgcgtatcttcgttgtatggatcaatgtagaaacgacgcaagatatcacgaatgaccttgatagcttcatcaatcttaggatcttgaatgtagaagtcttccattggcatcacttgatgactgtgtttccggtagaaaccagttgttaaagcaccatcgataaaccgaacaggaacttgcgccttgttccggtaacctgttggatcatccatccctaaaacaggttgcactggaatatctaaatgggctttttggaagacgttcaagacttggttacgcttgaaatctaattgggctgggtatgccaagtgttgtaatggcgcaatcccagtttgtgagtaaatgttagcttttgattcaacgcggtctgggcttttcttcaataaattaactaagcgcgcaaaaccatattgtttattgacctttgtgacttggatttctgcttgttcatcgggcaaaacgccttcgataaacaacggatagttgtcgactttagcgacacccatgccttcataggttaaatccataatatcaaccgtcaatgtttcattttttcttacaggtgcttgtattttcatagttacctctttttaattgtgtaaaaagagtctgagacaaaactgagttttgcttcggactcttttcttagctacaagtgtgcggtcaatccgcccacgttatccaatgttccagtttaacctattttaccatcgccgtctatgtcttcttcagaaattgcttcgacttcctttacgaataaatcttcggcagactgctgagtaggggtttctgatgtaatagcgtgatctggaatatcttccttattcacatacatctcgatatgttgttgcaagttagtaaaggtcattggtgcatcgccaccgtattcgccatctaaattaatcatcatcttaacgtcatcatcaccaggacgcgcaactagttttgacgtcttggtataaatgacccgtggatcattaacgtgtttgccacctttaatgacgagtgcgattaaatggactaattcggccatgttggctgtcttaaccacaatcaatgagaaattaccatcattcagttgtgcatccggcgcaatctgttcaaatccaccaactgaattggttaaaccgagtaagaatagggaagcttccccatcatacgtaccttcatcatattccagatgcatcttaatcggtttaatttggggtaacatctcagcaccttttacgacatacgcgagatagccaaaaattgacttaaagtctgaggggacttcataggtcaattcggttagcaaaccaccaccagcaatgttcatgaagtaattgtcattggcttgaccgatatccatcttaagcgtttggttcttcaaaatcacgcgggctgcttcaaccggattatcacgcggaatcttcaaagcccgagcataatcgtttgttgtcccagcaggaatcacggccatcattgggcgtttttccaagccggcaatgccgttgacgacttcattaattgtcccatcaccgccagcggcaacgattaaatcgaagttcgcctttgctgctcttgtggcctctttttgcgctgaagcttcttcaggcgttgtttgaaaagcactcgcttcataacccgcttgttccaaaatatccagaatatcagcgacactacgtttcatcacttcatgtcctgaagttggattataaattaaccgtgcacgtttttgcattcgaatctcctaaaatatcaattatcgtttgttcaattcggccatcaacaagtcattgacaactttcggattagcttgaccccgtgtttccttcataatcttaccgactaagaacccaactgcgcggtctttaccgttcttgaaatcgtcaattgattgttggttgtcatctaaaatacctgtgatgattggtgtcaacttagcagggtctgataattggaccatgcctttagcttcaacccaggcttttggatccgtgtcattttggataatttcttggaagactttcttagcaatcttcgatgaaataatcccgtctttaatcaaattgatcatttgggctaagtgggcaggtgtgagggctgtctcttgaaggtcaatttgtttgtcgttcaagtaagcattcacttcacccatcaaccagttagaaacttgttttggtgcggcgccatcagcaacagctgcttcaaagaagtcagacatttccttggtgttcgtcaagacacccgcatcgtattcaggcaagcccaattcatccacatagcgtgcacgccgtttagccggcatttcaggcatattgtcttgaacttcttgtaaccaatcatcaccaatgtgtaatggtggtagatctggttctgggaaataacgatagtcatccgcaccggtcttaacccgcatgaggaatgtttcgcctgttttttcgtcaaaacgacgggtttcagggcgcactgtttcgccagcaatcaaaagttgtgattgacgcttgatttcataagctaaccccaaacggacgtgattaaaggagttcaagttcttcaattctgatttcacaccatattgcttcgcaccgattggtcgcacagaaatgttagtatctacccgcattgaaccttcttccatcttaacgtcagatgcgccagtaaattgaacaatttggcgtaacgtttcaaggtaagcataggcttcttcaggcgttgacatatcaggttttgaaacaatttcaatcaaggcagtcccttgacggtttaaatcgacatatgaatagccgtcagagccatgggtattcttcccggcatcttcttcaacgtgcaattcggcaatcccgatttgctttgtatggccatcgacttcgacttcgatatagccatctttaccaaggggttgttcgtattgtgtgatttggtaagcttttggattatctggatagaagtaattcttccggtcgaaatgcgtatcgcgcgcaatatcagcgtgcaaggcagtcgcaaccatcatcccaagtgtgtatgcccctttattcaaggttggcaatgtcccaggataaccccagtcaatcacattcgtgttagtattcggttctgcaccatagtttacaggagatggactgtacatttttgaattggtttttaattcaatatgcacttcaagtccgattgttgtttcgaaattcattaggcttttcctcctttgaagcttggaacgttcttgttaaattgagttgcttgttcaaaggcataacctgcgcgataaacagattcttcatcaaatgctttcccaataatttgtaaaccaactggcatgccatctactaagccggcaggcactgacattgctggtaagccagccatgttagcaggaattgttaagatatcgttcatatacattgtcactggatctgatactttgcgacccaagtcaaaagcggtggttggtgttgttggtccaaccactaagtcgtagtctgcgaaaactttttcaaagtcgcgcacgattaatgtccgcacttgaccagccttcttgaagtaagcatcgtaaaagcctgatgaaagggcaaacgtccctaacataatccgccgtttcacttcatcaccgaaaccttcagaacgtgatttaacatacacatcttcaagtgtcttggcttcaggtgaacgataaccataacgaatcccgtcaaaacgtgacaagttagatgaagcttcacttgaagccataatgtagtaagtttggacggcatacttagaatttggcaagctgacttcgtcaacggttgcccctaatgatttcaaagtttcaatggctgtttcgatttgggctttaacgcctggttcgacaccttctgccatgtattctttggcaacagcaatcttcatacctttgatgtcaccatttaaagcggcacggaaatcaggcactgggatatcagcactcgtactatctttttcatcatgaccactgatggcttgtaaaacagtcgcattatcagcaactgtccgactaaagaccccaacttgatcaagacttgaagcaaaagcgatcgcaccccagcgtgacacacggccgtatgttggtttgatgccgacaatcccattaaatgcagctggttggcgaattgagccacccgtatctgtccctaaagaagcaacgacttcaccggccgcaactgctgctgcagaaccacctgatgaaccaccaggtactttgtctaagttccaagggttctttgtcttcttgaaggctgatgtttctgttgatgaacccattgcgaattcatccatgttgtttttaccgatcacaattgcatctttagcttttaatttttcaacaaccgttgcatcaaaaaccggcgtgaaattttcaagcatcttgctggcagcagtagttgttaagccatctgttaataagttatctttaatcccgattggcatcccagctaataagttatctgcatcaattggttgggcgtccactttggcagccgcagcttgtgcaccagcttcatcgattgctaaaaaagcatcaacttgtggttctctcttgtcaatttcagcaactgtttcagttaccaattggctagcagttaagtcaccagccactaatttggcatggatactttgtaaatcttcatataagtagttcacggctagtcttcctccttatccataatggcagggactttcaataagccgtccgctgaatctggtgcattcttcattaaaatctcgcgatctgtgccagcttgagccacatcttcgcggacaatattttgaaggttattcacgtgggtcgtcactgggacacccgttgtatcaactttatttaattcatcagtcattttcatgatgtctgcaagttgttcagtaaattgttctaactcagcatcgctaaaagctagttttgaaagttctgcgacatgctgaacttgtgttttatcaatcatgagtaaacccctcttctaattctgtcacttttatccattctgattaattttaccatatattaacgtataagaaagtgacatcccttgaaatttaccagtttttcctaatctttaccggtttcagcagatattgaaatatatttttactttctttttaaaagcgtaattgaatgttatgcaattcattagaaggcgatatgatttataagagtttataatataaacgcattcgtttaatcttatatactgaatacagataagaagttgtgaataatgtacaagactatcattaacttatagatgagtgttataatatgaaaatcaatatctcggaacaccttgtagcagtagtagttttaagtttaatgggtggcattgtcttacaaagtacgaccgtttcagcagcgaccacttcggttggtgtaactatcactggtgtaacacctggaatggccgctaaagccaaagaagcagccgcagaacaagccgctttagaagaagcatggttacaaacagaaatcgatgacagcgaacctgtagaagttaccgaaacaattggcggtcaaacaactcactactgggaatcagcagatggctcacgaagcacaactgcccccgcagaagttcaagacgaaacagtagccgcaccggaagtagcacctgaacaatttgaagaaacagcagttgaagaagaccaaccagccgaaaacttcaaaccaatgcctaagaaacatgacatcgatcaaaaagcaattgctttcaaacaactcacaacagattgggctagcaatcaaatcatgtcatcattggaagacttaatcactaaggctttccaacttaacaaataacactcagtattagctaagcggcaagtatcgtaaccaagcgtccccagttttgagtagtttcaaaagcaacactcaatagtctgtcggtgtaacttacggatttacccatactagaagttactaaactatttagaattgtttttttcctattttaaacgtttataaccactccactgctaaaataatttcattaaagtttgatgagttcacccaaaattttgggtgaatttttttattgcttaatgatttttcaaaaataagtctaattttaatagacatttcacaacttatttcatgctcataaaagaacccaaacctactgatagaagcaacttaattgattatcgggctgtattatcggtatccagtctgaactcccttcatgtaattttcatttacggcagactctggctagcctgattacagcagaacacctcaataggtgttatactcttaataacatctttttaaaaggagtctatcatgaaaaaatcagtccgtttaagcaatgccgtccacctgatgaccctgattgctttaaacccgtttgataacctttctagtcagcgcattgctaaaagcatcaatactaacccctcttttattcgccaaatcatggggcaacttaagacagctggcctattgacgagcgttaagggccatgccgaacccaaactaacgaaagctcctgaccaaatttcgctctgtgatatctataaagccgtcgatgatacccggttattgaacatcgatacccaaattgatcctagttgcggccccggacaaaatattcaattatcgcttgctacctattacgatcaaatccaagaaactgctgaacagcaaatgcaagccatcaaactagccgacattatcgaacaatatcaacaacgtctcgttgaaaatccagaattaaaactttacgaaaactaacacacaaaaaggttgggtaaattgcccaacctttttgtgtgttaatcctcagcggatacccggctgatgccgcactcttttcttttaaacgtgctctatcagccaaccgcttccggttaaccctgaatggcaaacaatcgctaacccggttattcaccattctgtgttaatcctcagcggatatccggctgatgccgcactcttttagatttgctagtacctttactaagtcatacttaactgcaataccgcggtccattaattcacgtggcacaatcgcatctttgggattaacggtgatatatgttgcttgtggattttggtacgttagattcataaacggttccttaataaacatcggtgtcatcatacccacacctagttctaaatagaccgtttttttaccttcagctttttgaataaattgacgatactttgcgtattgattgttgtagtgctgaccttcaaggaattcataaccacggacccattccaacatttcagcaccacatttagggcaccgcggaattaagttttcgggtaaatggccattttcaatttgcggaaataattggtcaacaactgtctgattaggatagacttgatcatgacatttatcggcacattgaaaataggaccagtcaccctgaatcgtggcgacatctttatctggaaaagctttcgagaattgcacgtcttgattcgtcgttatcaaatcatagtctttaccctttaaaatggctttcaagtcctgatacggttggtaaactggttcatgtaaaacaaaatgaattaaagacagcttaaagccccataaatcgccgggattataccaatcgggaccagccgcagccgacatgccggctgcggctcccacgatgacgtaatctgcctctttgagcgtcgttgccattttttgtagtgttgcttgatagtctaaattagtcatttttgaggagctccttaaaattatcatcgattgatccagcaagaccgattgaccgttgttcaatggctgcgggaatattgatttcgtgcggtaaattcaacgtgatgtaacggtaacttagactttgcgccaccaattgcatgaggagcgccttaattaactgattattagcaccaattcctaattccagaatcaccacgttttgtgaacgatacttttgaacaaatgcgttaaacttagcttgttgcttttgaatcatcggcattggattttgattgttaccaaaattaccttccacttcaaaaatccgttcttcgtcaaatccactcagttgaaaatgcatgttgccatttgatgtgacaacaaagtattcatgaccgcccaccaactgctttaaatcgcgaaagacaggtgtactttcatagtgatcaaccatataatcgaacaatactttgtaaaatgcatctctttcagccactgttggatagttgtaaaaagccccttgaagaatattcataatcccgtagcgttcataaaaagtcccaaagtgggtcataaacgcttcgtcgtgtgcaaaaatattgtaaccttccgtaattgatagcccattaccagcactaataatgacggcatccgcattgtctagccaattccgtgctgttttaaactcgttcatgctgctctcctttggtgtaataaataaaataacaacaatatcgcatattgtacactgttatttttaaaattacaaccactgacttttaaaggtccaaaaaaatagcgtcgacaactgcgttagttgtcgacgctatttttttgcctatcagtcataactgactgttgtcgcactctttaattaataactcccgaatacgtgggttgagaaccttttactgccggctgctcggcctacgtaagcttgcatcccctctgcagacgagattgaaatatctaatggaatattttgtggtaaatatttatcagcagcggttgcaatgtattgtgtgaaactcatgatttctgtttcactgtagaattgtgtattaacggtgatgttcatcccagccaatacaccatcttcatagtgtgcttgagccgtgacaccactcaagttcgggaagaaggtttggacttgttctttaaaactagtaaacgcgtccgcatcactttgattgaccgctttttcatcattaacgagtgggaaaacttggttggcttggttcattttgtgccatgaatcaatcgttgtactaccgtttttgctgaccccataagcgaagaaggttccgcccactaaactatccttaggtgcttgtttgtaaagccccaccacgatggttgtcttactcaaaccttttttctgccgtaaacgcgttaagaccttattggccatttgtttaccttgttgcgccatcatggcactagaaattttggtttcaaaagtagcaccatattgttccttggtatagtaatccacttgattcatcccaagaccaatactcatcccttcaagcgcaccatctgcccctaagaagtcttgttctaagatttgttggagatacagtggattccgcttatccggttctttttcaccattatcttctggatttaagccaagtgtattatcttttgattgacgtgccaaccatttttgcgcttccgccgttttgatggtttgaccttcttggtagaggtatttatcagtagggaattgttttttagaaatgtttaataagccactttccaaactcttcacatcaaatgccgtgttactttgttgtgtggttaatccacgtgtctgacttgtcttgtattggttattatcaataaccccttcatacatgctgtcagtcactttcccggtcgtttgtagctttttagtcgacttagttgatgatgacgaactcgaattgctttgtaaacttgtacaacctgccaacaataaaaccgttgcggctgcaactacccataatttatactttgccactgaaaatggcctccttataagtcctaattgattcgcttattgcgccaaataactatctaggtctgcttcgttgataattggaatctccaatgcttgcgccttggttaatttactgccggcatcttctccagcaatcaaaatatctgtttttttcgaaactgagccggtcactttagcgccgttatcttcaagttgttgtttcaactcaccgcgggtatattgcgatagtttaccggtcaagacaaccgtttttccgttaaagtaactatcactattttcagcttgtgcctttgtcaccccagtataggtcaggttgacttgcacttcagccaattcacgaattaaagtttgtacttgatcatcagcaaaataagtcgctaagctatccgcaatcgtctcgccaatcgtatcaaccgacataatttcttcttgatcactggccatcaaagcctccatcgtcaagaaatgttccgctaataaacgggctgctttggcaccaacatggcgaatccctaatccaaataataacctttctagcgaattctggcgactagcttcaattgcatttaacaaattattaatagatttttctttaaacttatccagttgcgcaagttgatcggccgttaagcggtataaatcggcaacatcatggaccaatccttgatccaataattgggcaataatccgtggacctaagccgtcaatattcatcgcatttctggaagcaaaatgcgttaactgttccttcacttgtgccggacacattgggttaatacaccgcaatgcaacttcttcatccaaatgaaccaattcatgaccacacgaaggacattctgtcggaatcacatacggttgactgtcagccggccgtttagccagtactacttgtgaaatttctggaatgatgtcgcccgctttgtgtaataaaaccgtgtccaacaaacggacatctttatcacgtaacatatcagcgttatgcaatgaggcgcgcgcgactgttgtaccagccaactggacaggatccatcacagcggttggcgtgacaacccctgtccgaccaattgtccattcgatgtcacgaacaatggttgccgcttcttcaggcgggaatttataagcaatctcccaccgtggcactttaaccgtattaccgagttggcgttgtaaagctaagtcgttaacttttaacacaaccccatcgatgccgtattctaagtcatcccgcgttgcttgatagcgctcgataaaggtctttatctctgtcatattatgacaaacttcagcggttggattgacgttaaagccgagttctgcaagcacttcaagcgcttcgtgctgggttgtcgcttgcacatcgtcaaaggtgacaatcgtgtacataaaggcactcaaattccgctcagccgctattttggcatctaattgccgtaaactaccagcagccgcattccgcgggtttgcaaatggcggttggccttctgcttcccgtttttcatttaatgccgcaaaagaggctttgggcatgtaacattcaccacggacctcaatagagactggcttggttaatgtttgcggaatcgccttgatggtcttaagattctgggtaatgtcctccccaatcgtcccattgcctcgcgtcgcaccacggacaaattgccctttttcatagatcaagtcaatcgcgagtccatcaatttttaattcgacattatattcgatggcatgctcaacgtttttttgaagtcgattatcaaaagtcgcgagttcttcctcagaaaaaacatcgcccattgataacatcggtacttcatgcgtcactttcttaaagccaggcagaacttgatcaccgactttttgagtgggcgagtcattagtaacaatgattggaaaggccgcttctaacgtttctaagtcgcgatacaattcatcgtacacgtgatcttcaaccactggggcgtcctttgtgtaataggcttcgctgtattcagctaatgtctggcggagttcttgggccgccgctgccgcttcagtttgcgtatattgatcgattggtttagctaatcccataatgaagactcctcactgtttatgatttgaaacgtgctttttaaagctgactcttgtgcttagcttcgtattgcaaacgaccgactttgtcggtcattcacaacactgtgctaatgctcagagtcaaatccgctttaaacacactctgttttgaaacgtgctttttggttgcaacaacttccgcttagcgctactcgtcaaacaactgcttgcagcagttattcgccgagttgtgctaatcctcagaagataatcgtcggaaacgcactctattctactttttcaattggtgcgaagcttgctagtagtcttttaacgccttgttctttgaaggcgatatctagttcttggtcgttgccggtcccgttgaccttgacaactgtgccaatgccccacttcttgtgttggactttttggccggctgtccaagcaccactgttatcgccgccagttgtgtcggcaatcttgtgactcgtcgttgttttatttgcattatacgttgtagccgttgcgcgtgcataacgattgctcttaccaaatggcacattgcgttctggaatactgccagcattgccatttgcgtaatccaataatttatcatcgatttcgccgacaaatcgggacgcttggttactttgttgacggccgtataacatccgtgaataagcgttggttaagtacaatttgctttcagcacgggtaatcccaacatatgccaaacggcgttcttcttccagttcgtcttcttctaataaagcacgtgatagtgggaagatgccttcttccatccccatcaagaaaacaactgggaattcaagtcctttagcagcatgcaaggtcatcatggtcacttcactggcttcttcttcgactgaatctaaatcagagaccaatgataattcggccaagaagtccacaaataaatcactgtcatcttcttctggttcataatgttcgtcgaattgtttggtaactgagagtaattcttcaatattttctaaacgactttgcgcttcgagggtgttttcaacttcgagcgcttttttgtagccagtcttatccaataattgttccgttaattccgtcacgtttaaaaattcgcgcatcttcgctaagtcaccaatgacgttgccaaaatcgatcaacgtcttgcgactcttacctggaatggttgagagttccgcattttgcgctgcttcaagtaatgaccattgatgatcatccgcgaattgcgttaatttttcgagagtgccggggccaattccccgtttcggactgttaacaacccgttcaaaactcattgaatcagacgcattcacgactaggcgtaagtaagccaagatatccttgatttctttacgatcgtagaacttatgcccgccgaccatcttgtatggcatgttggctttgacaaacgcttcttcaattgaccgtgattgggcatttgtccggtataaaacggcaaagtcgccgaatttacgttggttcttttgcatttcttcttggatcttcgtaatgacaaagagtgcttcgtcacgttcactttgaccccgataataagtaattggttggccttcgttattttcagtccacaattccttaggtttacgatattgattattgttaatcacaccgttggctgcttctagaatcgttttggttgaacggtaattttgttccaacatcactgatttagcatctggataatcatgttcgaagttcatgatgttgtccatgttagcgccccgccaaccataaatactctgatcggcatccccaacaacacagagattcttgtatttctcagctaacatgttaaccaatgtgtattgcgcttcattggtatcttggtattcatcaacgtggatgtattggaatttttcttgatagtgttcaagcgttggtttgttttctttaaataagcggatcgtttgcatgattaaatcatcgaaatcgagcgcttgattttgttggagtcgtttttgatattcggtgtagcattgggccacaattttttcgaatggtccgtttgctagacccgcatagtcgcttggtgtttggagttcatttttggcgttactaatcgtgcctaaaatcgcctttggttcaaacttcttcgtgtcgatgtttaaatcccgacaaacatggcgcattaacgtcaattgttcagaaggatccgcgattgtaaacgcgcgattgtagccaatttgttcaatctcccgacgtaaaatccgcacacaaagggcatggaaggtagatacccaaacatcttgagccccttcgccgagtaagttaccgacccgttcacgcatttcacgcgccgctttattcgtaaacgtaatcgccagcacgcgccatggtaaaacgtgcttttcttcaattaaataagcgacccgatgcgttaacacccgggtcttcccactaccagcacccgccatgattaaaagtgggccttctgttgtgaggaccgcttcagcttgcttatcgttcatcccttgtaacaattctttttcagacaaattagtcatccttccgtaaatgcaatcagcctatattataccaaactagataggtagaaaaaagcgaacacgacctagtaaaacggattctaatttttcgcaatcttctgccttgacctgggacgcgtttcataaattatactcaccttaatccaagaaaggtggtatgcatcatgattaaatacattttttctaacttagatggtacattgttaaaccaagacggacagctttctgaaaaagatattgcggctgtcaaagcaagcccactcccaatttccttgatttctgcgcgttcaccacaagaaatgcaagctacgattgatcagttagcgttaacgacaccccaagtcgcttttaacggggggttaatttatcaaccgacagatcttttcccaatggttttagcagaatatccacttgcaacctctgctgtcgcaacattaattgccgcattacaatctgaatttagtgacatcagtttaagtgcgtatgacttacaccactggtacacgcagacaattgacgctggtattgaggcaatcgctaagcaaaccggtcaattgccgacgctcatcaattttagtgatcaattgcaaaatccatttctcaagcttttcaaaattcaactgattatgcaaacgacacaacaacgggcaactgttgctgatttcatcaaccaatgccacttgcctggtctttcagtacaacaatcaggtacaatgaccttagaaattacgagtcatgaagccactaaagctaacgcattaaccaccatcttagaaaacactggactaacagtcgctgattgcgccgcgtttggtgaaggtcaaaacgacttagccatgttatcgctagttggccaccccatcgtcatgggcaatgccagtgatcaaatccagatggcgggtcaattcattacgaagactaatcatcacagtggcttcagctatggtctaaagaaatacattactaaagttaatcaaaaagtaggttaggattatgccaacaattcgtgatattgcccgcaaaagcggctattcggtttcgaccgtctcccgtgtgttaaatcatcaaaaatacgtctctgaacctgccaaaacggcaatcgaagcggtcattaaacaactcgattacgtgcctaatagcttagcgcgcgatttaagcttcggtcaaaataaaaatattggggtcgtcctaccgcacaatgaccatccgtatttcaaccaactcttaaacgggattatggatgccgcgttttcaagcggctatcacgttgtgctcctaccttccgaatataatcaagcagtcgaactagattatctcgaacaattaaaacgtaagaattttaccgcactcatttttacttcacatggtattgcactctcagtcttagcagagtacacgcgttatggtcaaattgtctgttgtgaagacccggggacccatcatatctcggccgtttattctcaccgtgagcccgcctatttagcggcattcaagtaccttaaagcccacaaagcacagcaaattggtctactattaagtcgtaatttagcgcaaagcccgacctggattgccgtcacgaacgcttatcaacaagttttcaactgccaacctgattccgagttaatggtcggtggcatgcgctcatttgaagatggctatcgcgccgctgaacaactggttgaaaaacagccaaccctcgcttgctattttacaaatggcgacgacattgccgctggtgtccgccaatatcatctggatcatcaactgccgaccccgcttttaattggtcaagaaaaacaattatccagttttttattgcaactgccaacaattgaccatcacttcttcaccctagggcaaaaagcgtttgaagtcgccctcagtaaccatcaccaagtttgtcgtttcgaatcagaatttattttgccataaaaaaagccactttaacctaacttttaggctaaggtggctttttatgtcggatgcttatgcaaacacccgatcaaaaattgtttgaacttgttttaagtgccattggtaatcaaaggcgtcgtctaaatcggcttttgaaagttcactcgtcactttcggatcggcttctaataattggcggaaatctttttgttcatcccatgctaaggctgtcttcggttggaccaaatcataggctgcttcacggctcagacccgcatccactaacttcaacaagacacgttggctgtaaattaaaccatgggtgatgttcatgtcagccttcatcttttcagggaagaccgtcaacgtcttcacaatccgcgtgaagcgattcaagatgtagtccaataaaatcgtagtatcgggtaaaataatccgttcagctgagctatgtgagatatcgcgttcgtgccataatgacacatcttccatcccggtaatcacatgaccgcgaatcacacgggctaagccactaacgttttcagaactaattggattgcgtttatgcggcatcgctgatgaacctttttgacctttagcaaagaattcttccacttcgcggacttctgttcgttgtaaatgccggatttcagtcgcaaaatgttcgattgaggtcgccacgaccgccatcgtgttaatgtaatcagcatgtagatctcgtgggagcacttgcgttgaaatatcttgggcccggatccctaagtgttctgtcacataggcttcaatttcaggcggaatattggcgaaagtcccaactgcaccactgattttaccggcttcaacgccttttgctgcgcgttcaaaacggtcttgattgcgtttcatttcagcataccaggttgctagttttaacccaaacgtcgttggttcagcatgcacgccatgcgtccgcccaatcatcacggtattttggtattcgtaagctttatcttttagaacggccataaaattggcgatatcagcccggattaaatcgttcgcttgtttcaaaatatacccttgtgctgtatcaacaacgtccgttgaagttagaccatagtggacccactttttttcatccgctaaggattctgaaacggcacgggtgaatgcgaccacatcatggtgtgtgatggcttctaagcgattgacttctgccaaatcaaagctagcattcgcgcgaattttctgcgcatcctctgtgggaatatcgcctaattttgcccacgcttcgacagctagaatttcaacttccaaccaagcttgataccgattttccgttgtccaaatggcgcccatttcgggacgtgtataacgttctaacataaacttctcctccaaatactacctaaatgctggtgatggtaaaacgtgctttttgtggcatctttctgtgcttaaccaaatttgccaaattcgcgattgcatcaccaactcgtcaaatccagttaatgctcaaaagataaccgccacaaatgcactctgttttgaaacgtgctccatcgggcatctttctgcggctagctacgtccgtccaacgatcgactgcgttgctcattcgccggcctatgctagtcctcaaaagataaccgcccgctgtcgcactctaatataagtctgccgcttcgtaattatcgattaagggttggatggcttgtccggttgctgtgaccgatccaatctgttgattggtcgtgacgttgtgcaaattaaagtaccaatccggtttgatcttcatctgtgtttgaattaatgaccgttgtgcttcttgaatccctaaggtcatccccgcattattgaggcgtgatgggccgactgccaactgacagatggccttcaaatgatattcatattgcgagaaattcaaggtatgtgtcaagacatcgcccgttgcgtgcggtgttggcataattcgtttcacataaatattcatagcgggtgttaaaaagaattcaaccccaaaaacacctgtatagtctaatttttccccaattaagtgggctaatcgattaatttcagtcgcaacatcttgattaatccgtgctggcacaagcgacattttcaagcgatgatcttcaaactcattttcgatgactggcagtgtcacacacttaccatcttcagttttaacgaccatcactgatagttcttgtgcgtcgggaatccaagattccaaaatataagtccccaactcaagggcagcttcaatgttttcaaggtcactcggttgttgaataaaacgttgatactgcttaccgtaacctttttgaatgggttttaagatacatggatatccgattgaatcgattgcatcttgaatatcatctacatcaacaactgtcgcatagggcggaatattgatatttaaatcactcaaaaagactttttcgaggtaccgatcttgcgtcacagacaacacattactgccttgaggtagataataatgttgtgccagttgttcgagcaccgtctcatctaataattcattcgtataggtcaacacttgactgacttcaccgagttggactaatgtttgataatcattgaattcaccatcgatctgactatcaattaaacgtgcaaatgaggtattttgcatctgcggggtcacaatcgcggctacccgataccccatttcttttgctttgagcgccaacatataggcccgttgatcatttccaataattccgatggtttgtcctggataaataactggcatcatattacctgctttcctgttcaccaaactgtatacccttattatagcgaatttaagcgttgtctgcctaatactttcctccatgataacaaatttttagacaaaaaaagagtgcctctcagcactccgttaaataacatttatttattttcgtctaaaaagacgacttgaccgtcttcaaacgctgcaattcgtgctaaagattccacttgaatgccgcgttgatctaacaattcgcgacctttttggaaagtcttttcgatgacaatcccgacaccttcaagttgtgcgccggcttcttcaataatagaaagtaagccttcaaccgcttgcccgttggctaagaaatcatcaatcactaaaacgcgatcgtctgcattcagaaacttcttcgaaattgaaatgtggttattcactttcttcgtgtatgaataaaccgttgcgctatacatgttatcttgtaacgttaaactcttgtgctttcttgcaaaaacaatgggaacgtggaatgctaagcccgcgaaaacagcgggcgcaatgccagatgattcaaccgttaggattttagtaatcttcttatccttaaataagcgttggaattcttcacccattgcagccattaaatctggatccacttggtgatttaagaagttatcgaccttcaatacgtcttgacctaatacttgaccatcttttttaatgcgttcctctaatagtcgcacgctgagctctcctttgtagcatcgttaaacatcactaccgatagtagtaacgactaataatgttttctgaaattgaattaaaaatagattaccacaaaaaaagcaacacaacaagctcaaatccagttattcagcgatttgaaaagagcctgtcacaaaccggaatttgtggcaatctcttttgagattaattagtagcagatttcccatgatttgtttcatagcattctttattgatcatattggtcgaggtggtaagccttaacgagctcaattaacttcgctggataatcagggtcagtcgcatagccgtcttgttgtaatgcatgggcagcctgctcataattagtggccgcgattacgtgtgcatactgcgtccggttccaagaggtcccataagcaaacaattgtacatggtcaagcatcgattcttgataattgttatatactctaaaacgcgctgttgtcgttacccactgaccatttaaatattccttggtcgtcatttccttggtgttggcctcattatcacccttaataccgaaataattatggtattgcgcagcaagtgagctcttcccccaatcactttctaaaatggcttgcgctaaagtaatacttggtaaaacatgatatttcgtctgtaattcttgggcatatggcaccatttttttaataaacgcttgcttcttagcttggcgcgattgttgttcctgtctggcttgatcggcaagttcttcttgggccttttgtccattataccgaactaataaaacgagcccaattccgagaataaatagactcactaaaacgaccactagccaatcggttgggtggcgtctcttcttagaatagtagttagctgttggtttgcgttttgtcgtcttgcgtttacgtttttttgccaatcctctgcctcaactttatctgaatctattctatattgtacacaaattcattcagaacaccaatctttaatttgtaacccccctttaatttctatttagcgcttttattgctataatattggctgtaaccgattacgatagtaaaggactgattttattgacaacgcttaactggggaattatcggcttaggcaatatcgccaatagtttcgcaacttattttaaccaacctgatggtcacatttatggggctgcttctcgttcactcgataaggcacaagcctttgccgaccaatacaatattccacatgcattcggtagttatgccgacatgctcggtgatgacaacatcgacatcgtctacattgcaaccccccacaattatcacttcgaaagcattatggcgagtcttgaagccggtaaacacgtcttctgtgaaaaagcgattacgatgaaccgccgcgaactcaatgcagcaaaggctcttgctaacgaaaagcacttgatattagctgaagcaatgaccatttatcacatgccattgtttgctgagattgaacgccaacaagtcgctaatcacttgggcgctttaaaatcaattcaagtctcttttggaagttataaagagcttgatccaaacaatcgcttcttcagtcccgcacttgccggcggtgcaatgcttgatattggtgtttatgccctctcatttgcacgtcggatgttaactgctaaaccagaacttgtagcgacgcaatgggtgccatcagaatccggtgttgatcagcaatcaacattacttttaaataatgccaagcatgaaatggtgactgttaccttaaacattcatgcgaagatgcctaaacaaggtgttctcgtttatgaaaatggctatgtcaccgttgacgattatccacggcctgacaaagccaccctcactttcccagatggtcgcgttgagaccattcaagcgggtgacgcaaccaacgcaatgaactatgaactccatgatttccaagaaacagtgcgcggaaatcaatcaaacgataccctcgaattatcaagcgatgtcatggacatcatgtcagacgcacgtgctgaatggggctttgtctatccatttgaaaaacgcactgatctcgattaatccattcaaaaaacctggccaatttggtcaggtttttttagagtattttagtgagaaccaccatatcttttaggcgaatcccattttcatagattggcgtttgatattggtcgaagaagtttttgcgaattcgttcgaaccgaaagccttgacgcaaataaaaaccaatcgctgccaaactaccgtccccagtgccaactagcaatgattgaaacccttggtcaattgcaatcgtctgaatttgagtcatcatttgcccaccgaatcctcgatgttgccattctggccgtaccgcaatatttttaagttctacctgctgatcgttgagtgccatcagatggaaggccccgatgacttgctgctgatcgcttaaggtgtaaaattgcccatgcatcaaatagcgttcaatcatgccgacttcttcatccgctaacaatagatcatccagccactgtcgccgtgctgcgccctcaatcaattgatacgttaacatctccagctcaccacccaatcaaaaaaaggggtcgcgacaaaattgcttttgccgcgacccctgggttaatttttaaattagtttttgtttacgttaacagcttgtgggccgcggtcgctttcttcgatatcgaaagaaacgctttgaccttcttcaagagtcttgtagccttcaccttggatagctgagaaatgtacgaatacatcactaccatcttcgcgagttacaaagccgtaacctttttctgcgttaaaccattttacagttccgttttccatgagaaaaatcctccttgtgtcgatgacacattataaatttgtgtatttctggtggtccgatggaagaaagttcttttggaaacattcgtaccgcaaccattcaaaaagtacaaacatagtgtaacacaggcaacaaccattggcaaccatttggcaataaaaataaaccgttttctatcacggacaatcagcatccgtgtttttagacaagtgttattttatatgttgaatcatgccccaaatgatttggctttttgctttaattacgttaagatagcagtataactttttctcattggagtgcttgcttatgctaaaactattgaaacggctattaccaattatcttcatcggggtgagcctagccgcttgccaaaaaccgatggatactaaacatcaactccaagccgatatgcaaaccgttgaagatgcgactaagcaacaacgaacagctctttcaaccctcgaaacaatcggcgatccagttcctgataactatctcacgattcaaaaaaaatatcccgacgaaaatctattaacgattgaagatactaagattgcgacgactgcggccaagcgcgaagcagcctttcaaagtcttaaagaacaacaagctgtgctcaaaccggtcattaaacgcctcaccaaactggtcaagcaagaaaacgatgaattgccgattgaacaagtcaaagatttaaatcaaagtcttaagatttcgacacttgattatacaaccttggccaccttctacaacgcggccactaaagcatctgatgaattttacagcgaccatacagatgctgatgcagacgaagacagtcttaaatcaccaatcaatcgtttaaatcaatattacagttcagtttatcaacaagccgaaattgctaaggtcaacatgaacacagttgctgcgcatgctaagaaagtgcaaaaacaactggaataaacaaaaaaggagttggacaaagtcacgtttgtccaactccttttttcaatctttaattattcaacccgtggcggaccacaatcgtcggctgtagctacccgcacttgttattgcgtccgtttaaaccgcatgagtggtgttgcgactagtggtgtcaccacagctgctaaggttgcttccattacagcatttaacgcaacaacgccaagcatcacgatgattaaatgggtcggatcagtatgatacatccctgccgcttggtgtccgtaaagcacacgcgttaagccaatcactaaaatggtattgattaaagccccgaaaatcccagctaaagccattgcaccggttttacgaattttagtttgatataagtgttggaacgtaaagccagcaatcatcccagccatcaaccgcggtaaaatagcgataattggattttgaaagattaaaagtgaaagcggatcgcctggagaggtataggctctaaataatgaaatcaaaccccaaattaatcctagaatcgccccttggcgtgtgcccaggatcacggccccaataatgaccgttaaatgaattgttgttacggctggtagcccaggaatgatattaatataaccgaccatcggaataaaactttgaatgattaaaaaagcggttaaaatcgccataatactaatcgtataagctgatgaatttttatgtgtcatcctaactgactcctaaactgaatttattgctcattatagcgatttgtcaccctagtttcaatcatttacatcaagggacaaaaaaaggtaattccaattggaattacctaactgaattatgatgcgggtgagaagactcgaacttccaccgggaaaattcccgacaagatccttaatcttgcgcgtctgccattccgccacacccgcgtaacttgctttatcactttaagccacgtacattagtataagagaaacgatgattgaagtcaattaaaattttactttggagacgattacatgcccattatccccgctaaactaaccgatattgccaaattaaccaccctgtatcaacaattaacgactgaaatgcatgtgctacaacccactaattaccaagctgattacacgcctgagttctttgactggcaacaaatgataactgatccactacaagcagtctttgttcatcaaaaccaagatgcgcaaatcgatgccttttgtcacgttacaacagcccaaacaagtccctcacccttgtttatcgcacaccgctttgcttatctcacaacactgtatgttgcaccagaggcacgccgccaccacgtcgctacacaactgctatcgtccgcaaagcaatggcaacaaacacaagcgctcgattatttagaactaaccgtgttagggaataatccggctgcgttggccctctatcagaagctgggctacaccactcagaatcaaactttacgcgccaactaaaaaaaggccacccctaaacataggggtggccttttttcattgaatttgtgtggtttgataaatcagtcgtccatgacaccgccgacaaacatagcgagccgtattcattcgacggcgacgtggatagacttgcccacagtctgaacatttataaatcacaattttgctcgatttagctgtcttttgtgcagctggtgcatagcgcgcacccccgacttgtgcaagtaattgtttaaactctgcgtctcgatgacggtaaccgcgatgcaacagatgcaggtgataatggcaaagctcatgcttaatcaccccttctaaggtctgtgtatcatgttcggtcaacatctttggattgatatcgatatgatgatcctgtaaatgatagcgcccgccggttgtttttaaacgccgattgaaatttacttgatgcacaaacggccgattaaaaaactgcaacgataaccgttcaatcaattcagttaaggcttgatcagtcatttgcctttggcgctttcattgtcagttgtacgcgttcacgttcttgatcaacactcatcacccaaacctgaacgacgtcgccaactgccacttcatcagaaggatgtttaacaaagtggtttgccagttgagaaatgtgcactaagccatcgtgtttcacaccaatatcgacaaaggccccaaaatcaatcacgttgcggactgtgccttctaacgccatattcggtttcaaatccgccaaggttaagacatcatgacgtaacaatggcgccgtcatctgatcccgtaaatcacgccctggtttttgcaaactacttaagatgtcggtgattgtttcaatcccgacctctaattcagccgctagagccggtacttgcatttgtgcaatcgccgtcttcaacgcatcgcttcctaaagcatcaacggttaacccaaatgatttcaaaatggctttagccgttggataactttctggatgaatatcagtattatcgagtggattgtccccattaataatccgcaagaatccgaccgattgttcataagctttaggccctaagcgtggtactttcttcaaagcactccgcttttgataaaggccgttttcattgcgatattgcacaatgttttgagcagtagttgctgacaaccctgagatatgttgtagcagctgagggctagccgtattcaggttgactcccacactattcacgacatcctcaatcactgtatcgagttgcacagtgagctctttttgcgccacatcgtgttgatattgtccaacccccactgcttgtggattaatcttgatcaattcagctaacggatcttgcaaacgacgggcaatactaatcgcacttcgttcttcaacgtgtaaatctggaaattctgcccgtgctgcatcactcgcagaataaacagaagcccccgcttcattgacaatcacatagaaaatttcccgggaaatagatttcaaacacgtcgttacgaattcttctgattcacgactcgcagtcccattaccgattgcaatcatttcaacttgatatttctcgagtaaagcagtgaattcatccgccgcttttgatcgtttgtcagctgaagctggtttgtgtgggtaaatgactaacttatccaagaatattccagtgccatcgacaacggctaatttacacccagtccgataagcgggatcaaagcctaatacaactttacccttcaatggtggttgcaacaagagatgcttcaagttatcaccaaagacactaatcgcttgttgatcagctttctcctttaattgcttgcgtaattcacgctcaattaccggtccaataaaccgcttataggcatcttcaaccgcagacttgatgaccattgctgacgctgaatcttgtccatacaacagatcttggctgatccgactggcaattacttgatcgtcaatcataattttagctttcaaaataccttcgttttcaccacggttaatcgctaaatattgatgttccgctaccttcgttaaatcggcagtgaaatcataatagatttgataaacttgcttctcatcggctgcttcgtctttaacttgactggccaactgaccattttgccaagtatattggcgcacccaattccgatattttgctgtttcactaatattttccgccaatatttcatgaacaccagctaaaacagcagctgtatcattgattttttgatctggattgaggtaagcttcagcttttgccaataatgcttgttcggttaagctaggtaaccctgcgataaactgcgcaaaaggttccaagccggcttctttagcgatggttgctttggtccgtcgtttttgtttatagggtaagtacagatcctctaaagcttgcagttgcgttgccgtttcaatttgttgtttgagttttggcgttaatttttcttgttcagcgatatttttcaaaatatcggttttacgtttttcgagcgtcgttaagtattgaaatgtgctttcaatttcacgaatttgaacttcatcgaggcttcccgttcgttcttttcgataccgcgcaacaaacggtacggtattgccttcttctaaaagacctaacgttgctttgatttgttgtggtcgatactgtgttaattgttgaatcacaagattttgaatatcaggcatctgattgcactccttttgcttcaattaaaaaaacagcccccgacttgggaactgtcaactttcgccctaagcgattcttgaaatattttggatgtatttagaaatccgttccgttgctttgtcttgattcatttctgaagctgcaaaagcttgcatatcaacggtttgatcatcatgcatgcttgtaattaaatcttcacagccttgaatgaaatcagcgtaagcaccgattaaacgttggttgttccccatcaaacgagcgggcgcaacaactgttttgaattgtgctaagaattcgtgatattgatcaacaccatctctgaagatttgtgctgtcttttgatagtcttgttcgctcatttcggctaacttaccatcagcaacggctgcttttaaaggggtgaaatacttactcatcccttcttgtactttttcagtattatcgattaaatcgttgacagcttggccgtatttggcaagcttttgttgcgttttattcatgtccatcctcctagtttcctatggtttagtatactaatttcccaatcggcttgcaattaaaatattaaagcatgtgtcattaatagaaaaggcatgcttagttcatcaaaggacatttacctcattaaaaaaacgctagcgacaaaatctcgtttgtcactagcgtcgattattacctatcttctcttcaacattctactcgtccacgactgaccaaacattaactttgtcaataagtcgatacaagcgaaaataactaaataaagtaagaaactcaacaaccaattattttgaacgtgagtaatccgttccagaccaccaaagatgaaaagtgatatcagaaactgtaagaatatttgcatacgtaatcctccctacaaaactcactaacataaaagttatttaatcacctttattatagtttaattgacaagcactttacaaggttggcaacaaattatttagccattctccgctggaagaacttcacaatttccacaatcacaatcaatgagaatgaggctgctaggacaattccccattggtgaatatcgagatgtgacacgtggaataggccgtttaagccaggtaccataatcgttgcggctaacaggaggaatgaagctaagacagcccagttgaaagctttattcttgaaaaagccaactgtaaagattgattggtgcactgacttcacgttaaacgcgtggaagagttgaatcatccctaacgttgcataggccatcgttaacgcatcagcatgtgctaagccgctcgcttgatgcactgggtacgtaatcgctaaggcatacacaccaagcgtaatcccaccttctaagagaccttgatagataatcgcttggaagacaccgccggagaagaagtttgacttgcgcccacgtggtttttgattcataatccccggttcagtgggctcaacccccaacgcaatcgctgggaatgtatccgtcactaagttaatccataagatgtgcaccggttgcagaatttgccagcctaaaatcgtcatcatgaataaggtaaggacttcacctaggttagctgacaataaatattgaattgatttttgaatgttggcaaagactttacgaccttctttaacagccacgacaatcgttgagaagttatcatcggcaagcaccatatcactggcgccttttgatacttctgtcccggtaatccccatcccaattccgatatctgcggacttcaaggctggcgcatcattgacaccatccccggtcattgcaacgactttaccatgtttttgccaagctctaacaatccgcaccttatgttctggcgcaactcgcgcataaactgcgtactgactgacttttttagcaaatgtctcgtcatccatttgatccagttcggcacctgtcacaacggccgcatccgcatcttgttcaggtgtaataatccctaaacgaagtgcgatggcttctgcagtatcccggtgatcaccggtaatcattaacgtccgaatccctgctgaatgcgcatcagttacagcttgtttggcttctggtcgttctggatcaatcatcccgactaaaccagcaaagattaactcatcttcaatcgtcggatcaattgttgctggtaagctatctaacggtttatacgctaatgccaagacacgtaacgcttgtttagctaaatcgtggtttgttttgagtaaaaattgccgttcatcttcatctaacggttgaacatcgccattggcatcaataaaatgactcacgcgtttgagtaattcatccggtgcacccttagtggtcattaataattgaccatctttggcttgatgaatcgttgtcatcagcttccgttctgaatcaaacggtacttcacccacgcgtggtgctgctgctagggcatcttggatcacgaaacctttatcacgcccataagcaattaaagccgtttccgttggatcaccaattaactggccatcctctgtgattttcgtatcgttggcaaggttcataatgcttaacgctaaatcatcgcctgccaagtcggctgatgcttcttgcaactgattattggtaaaaatcttttctaccgtcatttgattcatcgttaacgtcccagttttatcggacgcaataatgtcggtactccccagtgtttccacagcaggtaacttccgtaccaacgcatttcgtttaaccatcttctgtgtcccaagggctaaaataaccgtcacaattgccggtaatccttctggaattgcggcaaccgctaatgagattgaggttaataacatgttaattggtgattgcgcgtggcgtaagtagccgaccacaaatacaacagccgcaatgattaaaatcataatcgttaaactcttaccaagttgacttaaattcatttgcaatggtgttgtggtttcaccagcttgatttaacatcccagcaattttaccaacttcagtttgcatcccagtgcccgtcacaaccccgacaccacgaccgtaagtcacattactattcatgaatgccatgttggtccgatcgccaatcccactttcaggatcggttaacgttgcaacagtcttatcaaccggtaccgattcacccgtcaaagccgattcctcaatcttcaaagccgctgattctaacaagcgtaaatcagctgggacgatatcgcccgcttctaatagcacgatatcaccgacaaccagttcttcactcttgattttaacaatctgcccgttacggcgtacatgtgcgtccggggttgccatctcttttaaagcatcaattgcttgttccgctttggcttcttggaaaacaccaaaaacggcattcaagataacaacggcgagaataataatcgcatctggccattcatgtgctaaaaagccggcaatcattgccgctactaataagacgataatcatgaaatctttgaactgttctaaaaaacgaacgaacaagctttttcgtttagtctcagtcaactgattacgcccgtatttagcgagtcgttcagcaacttggtcttgcgttagcccatcagttgttgtggctaaactttttaaagtctcatccgttgattgggtaaagaatgaacttggttgatctgtcattgtcgtgcctcctatagatagatttcggggtaaaaaaagagacctatagagaattcaaagaatcccccataagtctcactaattaagataacaccagaatattgccttgttggtggcgttatcgcagacaagctgccagttactcccttatcgttaaactaattataagacagaaccaatctaaaacgcaagtaaaacattattctgacgtccaattaatttagcggataaacaaaatccagccgattaacgccaaaatgtatcaaaaacagtaattggtaaatgccgcttgtgcgctgtcttttggtaccacttttcaatcttggtagcagcctcttctgccacttcacgaccctctaaataatcatcaatttgattataagtgacaccgagtgctaattcatctggcaatgctgggcggtcttcttcaagatcggcggttggaatcttttcgtaaaggtgttttggtgcctttaattccgccagcatcgctttgccttgacgcttatctaatctgaaaatcggtacgagatcagcaccaccatcaccgaacttcgtatagaaaccggtaattgattcagcagaatgatccgtgcctaaaaccgcacccttcatttcaccagcgataccgtattgcgcaatcatccgcacacgtgccttgatattacctttattaaaatcactgactgtcacttctgtttccgccagtgcttgaaccattgcatccactgacgctttgatattcacacgccggacctgatccgcttgcatgaaatcaatggcagccattgcatccgattcgtctgcctgctcaccatatggtaatcgaacagcgatgaattgataggtttcatcacccgtttcagcacgcatctcacggaccgcttgttcagctaaagcaccgactaatgttgaatcttggccaccagaaatcccgaggacgtatgtttttaaaaatgtattcttttttaaataatcttttagaaaatcaactgaccgtcgaatttccgctttcggatcgattgtaggttgggtctttaaggctgcgataatttcagcttgtaaaggtctcatgattaaataccaccttttttaaatgttagattgctaacttttttgaaacgcgcttccttcaacagctttgtccggcaaataagcgctagcgcacttattcaccagacttcactatactcaaaagctaaccgttgaatgaaccactctgcttagagcgcactctgattttggacttcttctttgactcttctgatttgggccattttgtgatcccatgtgcgttgtgaaaggtcaactgggtaatcttgcgggttcaagtcccgcttgtattcatcccataacgagtcgagattttcactacagaacttcttaatcgcgccaagttcgggcaatttgtaaacgcgttgcccgtgttcaaaaatcgtccgtagaattggccgcgcattaaagtccgtcacagttttattaatgtacgtgtaatttgggtggaacatataaattgaatcttgttccagtggatcttcatcccaaagcgtaatgtaatccccttcagatttaccatcaacttttttagtgattcgccaaacttgcttgcgccctggtgtggaaactttctcaacattacttgaaagcttgatggtatcgaccatcttcccgtcgccgttttcaatcgaaacaagcttatagacagcccctagcgcgggttgatcataagccgtaatcaatttcgtgccgacaccccaaacatcaattttggcttcttgcatcttcaagttttggatggtcttttcatctaaatcatttgaagcgtaaactttagcatcggtaaaaccggcttcgtccaattgttggcgcacgcgttttgaaatataggccatgtcgccactatcaatccgcaccccttggaagttaatcttgctaccaaattcctgagcgacccgaatcgcacttggcacaccacttttgagggtgtcatacgtatccaccaagaaaacacaatcgtgatgcgtttcagcataagcgcggaatgcttcataatcattgcgatagacttgcacgagtgaatgcgcatgcgtcccactggctggaatcccaaaaatctttgaagcacgtacgttacttgtagcgtcaaaaccgccgatataagctgcccgagtgccccataaggcagcgtccagttcttgggcacggcgcgtcccgaattccaaaacaggatccttaccgaccacagatttaatccgtgcagctttcgtagcgattagtgtttgataattgatgatgtttaacaaggccgtttcaattaactgacattgcgccaatggtccttcgatttgtaaaatcggttcattcccaaaaaccaattcgccctcaactgctgaacgaattgttaaatcaaaatcaagattggctaaataatcaagaaaatcagctggataccccacctcatcacgtagataagcgatgtcactttcggtgaagtgtaagttttctagataattcacgatgtgttctaaaccagcaaaaattgcgtaaccattttcaaatggtaattttctgaaataacattcaaaaactgctgtgcgattgtgcaagtcctttttaaagtaagtaagcatcatattcagctgatacaagtctgtatgcaacaaaagactgtcatcagggtataagtttggcatgttaagctcctaattagagatatatttagtataactatatcataaaataaaagaggcatacaaaaaagacggtagaaaaccgtcttttttgtttgagactagaagaaacgccaaccccatttattaaaatactgtgccatggacttcaagaagatcttaaatcccttgaaactgcggtgggatgccattccataaaaatgagtgacaaccgcgtctggtacatataaaatcgtatgaccgctttggttaattcgatcacaaaggtcattatcttcgaaatacataaagaagcgttcatcgaaaccatcaatagcccgaatcacatcagtccgcgtaaacatgaacgcaccagatccatattgaatcacttgccgtcgatccgttaaatcccggcattcataagccgccaagcgtttttcaaatagcttcttaacccatttaaaaggtacaaagcgcagcatataatcgaagacatctagcttccgccgtactaaatgttgggtcgtaccatccggaccaacaatcttcggcgttagcatccctaagctatcattagcatcttgatccgctaaaatccgatacatccgttcaaatgcgttttgatttaaaataatatccggattgcaaatcagaaaataatcggatgccgtcagcttcaggttggcattatgcccatgaccgaacccaagattctcttggccttcaatgatttcaacatcatctgcagcataggcttttaattgcgccaaatactcaggtgttgacccattatcatgaaccaatacttttaccgggtattgccccaagacagttgccttgatactatctaacgtcttaaagacgtattgactattataggtcacaatactaatcgtcaccgttttatccagattattactcatcatctcatcctaatcaatttttgccataaatttttgtaatgccacttgccaggttggtacttcaaaaccagttgccttgaccttcgtcaaatccatgattgaatgtcttggacggaatgctttttgaggatattcgtctgatgttaccggactcacttctacgtctttatccttcaagatttcgctcgcaaattcataccaagtacatgaattgtcatttgaaagttgatacaagccatacggcacgtcgttttgaacagcgtataacatgaattcagccaacgtccgggtccaagttggacgaccgacttgatcactaacgactgttaaatgatcatgcgtcttcgcaagatttaacatcgtgtaaacgaagttcttaccatattcaccaaagacccatgaagtccggatgatgtagtatttgctcattgtatttgcaacggcttcttcaccagccaattttgtgcgaccatattcattcttaggtgcagctggggtttcttctgtgtacatttgatcattcgtaccatcaaagacataatccgtactaatgtaaacaagcgttgcgccgattgcttcagcagcattggcaatgttttgcgttccaaccacgttcactttgtaattgattgacttgccaggttcttcttcagcagcatcgacagctgtataagcagcacagtgataaaccaattccggcttattcttttcgaagtaagttgtgactgccgctgaatcagtaatatctaactcagtagcatctgtccccacgtattcaatttgattttcatctaataagtgccgtaattcggtccctaattgaccatttgcaccagtgattaaaattttcatagaataaatctcctctattttaattcatccttaacaacttgtaatgccgcatgaatcacttgatgcatatcgtagtaacgatattgccctagacggccaccgaagaccactttgggttctgtcaccgataaatcgcggtatgctttgtataagcggttatttttgtcgttattgattgggtaataaggttcgtcaccacgtgaccagttcgcaggatattccttcgtcacgattgttttattcttatcgcctttaccaaattcaaagtgtttatgttcgatcacccgtgtataaggcgtttcggcatctgtatagttaacgaccgcgtttccttggtagttatcaacgtccatttcttcggtttcaaagcgtaaactccgatattcgagttcccctaattgataatcaaagaattgatcaatcataccggtaaagatgactttatcgtattgatcgatgtagtcttgtttcttatcgaagaaatcaacacccgtttcaacatcgattaaatcactagccaacattttttcaatgatttgtgtatacccaccaattggaatcccttggtatgtatcgttgaaataattattatcatacgttaaccgtactggtaaacgacgaataataaatgatggtaattcggtagccttttggccccattgcttttcagtataccctttgattagtttttggtaaatatccgtcccaattaatgaaatagcttgttcttccaagttttctggttctttatcgcccaacaccttgcgctgttccgcaattttagcggccgcttcggcaggtgttgccacaccccataacttattgaacgtattcatgttaaatggcaagttgtagatttcacctttgtagttagcgactggactattggtgtaacggttaaactctgcaaattgattaatgtattcccagatttctttgttgctagtatggaaaatgtgggccccatattggtgaacttgaatgccatcaatttcctttgtatagatattaccagcgatgtggtcgcgtttttcaattactttaacgtggttcccacgtttggccgcctcgtatgcgaaagttgcgccaaagagtccggaaccgactactaaataattagtcatattattttctcctaaatctaaattattatctcaatcattaattaacgagtaactttctttactaatctgacaatatctctgttaattctagttctcaataatacaagtagcaatacatatacaattgtcacaataattgaattaactaccattgttaagaacaaactaggtaacacaattttaaaattcaggacagcaagaacggtcattagaaaagcaagtacatacctaagctgttcatgaactagataccgtaaatctgcttctttacgaaccatgtaaattctcatagaacatacgataaactcggttaaaataataaccgccgttccgccatccgctccccagatattaacacaaatcacatttaaaataacactaattaccgcacccacaattgccggaattgcatattgtttataatcaccattgaccaatgagaattgactgccaaatacttcaccataggaaataaaaatcattattaaaccgacccataacatattattcgtcattggtgtatatgatttcccataaaaccacggtacaaattcggatgcatttaccattagtaacatagtaaacagttgtgcaactaataatgtatagtcaagtgatgtttttaataactgatccactttttcattattagcatgattcattcgaagttggaccattcttggcattaaaatggtactaactgaagtaataagtgttactaacattcgcgcaatccgttgtgattgatcgtaataagttaattggacaggccctgcaatccaacctactagcgtactatcaaaattggtataaaattgaactgcaagctgtgggataactaaaatcatggcttcttttaaaaagattgacttagaaaagaaccctttaaaacttacttttgtgatgatcccctttaaattaagccagaaaataatatttgcaaaaaagatgcttaaactattaattaatacgtaataacctaaatcactaggtttctttacaaatataaaaatcattgcaacagaacatattttaattaaggtatttcgaacaacaacttttctaacttctcctaatcctatgaagacccaggaaatgtcaattgcgaatccaattaaatatggaatattcaatagcaagtatgttttatattcactgaacattgcaaagaacgtatacgccagaatcactaaacaacctactaaaaactgtattttccataactgtacaaagttactacctagttcacctttatctttgtgggattgggcaataattcttgaacctaattgattcatccccatcaaaatcacaaaactcagaaacatggaaatagacgtaatgaatgaataactccctagtgctcttgcacccaagacacgtgctacatacggtactgtgataattggcaatgccagtatcaacaactggtaaataccgttgtagattatattgttaagcgtctttttcataattgctccatatctttcaatatcctagataatacatccacattattgaccgtttttagcgtagttggcttccacggctgctttttctgcttgccaccagtcttcattgtcacgataccagtcgatggtatgttgtaagcctgatttaaaatcagtgaattctggttgccagcctaattcttcccgtaacttcgttgaatcgatggcatagcgtaagtcatgacccggacggtctttaacttgatcataagcatctttgggttgccccattaattctaagattaattccaaaacatctttattgttttgttcgccgtcggcaccgattaaataagtttcaccgattttgcctttggttaggattgcccatacggcgcttgagtgatcattcgtatgaatccaatcacgcacattttgacctgaaccgtaaagttttggtcgaatcccacttaaaatattggtaatttgacggggaatgaatttttcaatgtgttgataaggaccgtagttatttgaacagtttgaaatggttgcttgtaggccgaatgaacgcacccatgcccggactaacaagtctgagctcgcctttgatgatgaataaggactacttgggttataacgcgtttcaggagtgaatttttcaccaacgccttcgccgtgccctggtaagtcttcacgcaatggtaaatcaccgtatacttcatcggttgaaacgtggtgataacgcacattatacttgcgacaagcttcgatcaacgtatatgaaccgatgatgttcgtttgaataaagggtgaaggatctttcaaagaattatcgttgtgactttcggcagcatagtgtaccactgcgtctgtcttttggactaagcgatccactaattcagcgtcacagatatcgccaacaactaattccacacggtctgctggtaaaccggccaagttcgcacggttcccagcgtaagttaatttatctaaaaccgtcacgtgaacttctgggtggttattcaccacataatgcacgaagttagaaccgataaagccggccccaccggtaacaataatatttttcatagtgtgtcgatctccttaaatttcaccgtaaacaaacggattatctttttcaaattcagtaaaggttggttggttagcatcttttttagacgtaattgcttggtcaaaatcaattggccaatcgatgtttaattctggtgtcttgaatgaaataccgccgtcagcttctgcatcatagtagccatcacatttatacaagaagttaacgttatccgtcaaagtgacaaagccatgggcgaagccctttggaacaagtaattgacggtgattgctggcagaaaggatgtacccttcccattgtttgtaagttggtgaacctgcacgaacgtcaacgatgacatctaagacagccccagtcaccacgcgaattaatttcgtttgcgcagctttaccgcgttggaaatgtaagcctcgtaaaacgcctgcttgcgttgaaagtgagtgattatcttgaatgaaatcaatatcaatgcccgcttctttgaaatcgcgatctgaataagattctgtaaagaatccacgatgatcaccaaagacggctggttcaataattttaacgtcttgtaatttagttgttgtgacttttaacttacccatgattacttacccctaatcttcttttactaatcgcaataaatattgaccgtagtcgtttttcttgagtggttgtgccaattcaatcacttttgctttatcgatatagtgcatgcggtaagcaatttcttctagacacgccactttcaagttttgccgtttttgaacggtcgcaataaaactgctggcttcttgtaatgaatcatgggttccagtatctaaccaagcaaacccacggcccattaattcaacatctagctggcctttttcaagatacgctttgttgatgtctgtaatttctagttcgccacgtggtgaaggtttaatattcttcgcaatgtcgacaacttggttgtcgtagaagtataacccagtcaccgcatagttacttgccggatgttctggcttttcaacgattgatttagcatgcatattttcatcaaaatcaacaacgccaaagcgttctggatcattcacatgataaccaaaaacggttgcgcctgattctttttgagccgctctttggagcatttctgaaaggccaccaccataatagatgttgtcacctaagattaagcatactgaatcatcgccgatgaagtccgccccaatcacgaaagcctctgccaaaccattgggttgttcttgaacggcgtattcgatgtttaaccctaagtcattgccgttgccaaataattctttaaaccgtggtgtatcagttggggttgagataatcataatatcttgaatcccggccaacatgagcactgacattggatagtaaatcattggtttgtcatagattggaatcaattgttttgataaagcgcgtgtgatgggatacaaacgtgtcccagaaccgcctgctagaataatacctttcattttgaggactccttcatctttaaataagtattcagcattcttaagcgaccaatcaacatttcttttttgtttctcttactcatgccagtgacattaccaccgtgtcgaacatagtccattaaagtagcagaagtcgccgtaattttaaaatgattctttttagcaacaagaaacagccactgatcatgcatttcgattttttctggaaaaggcaacgcggcatctaataatcgtctcgaaatagccatcatggcaccagtataaccatttttaattaaattactaaatacactttggtcaacttggttatggttgtagtgattccatgactgatcaacaacctctccattctttccaataacagttgcatcatggacaattaaatcagcgtgcccatttacataagcatcttgaataatttccactttatcatcatgccattcatcgtcttggtcagaaagaaaaacaagattgcctgtcgcaagtcctagtgctttctcaaacgatttaattggtcccatattctgatcgtttcttttcagaattgtttgcccgttaaaattgaccaacaactccctcagtaaccccattgtatcatccgatgaacaatcatcgataatcacaatttcatcttgcgcggttaattgcttgataattgattttatctgtttgggtaaggttttgacaccattataagttgccatgcaaacagaaatattagtcactctgtctcaccaaatctttcatttaaaacggtaagaatgcatcattcttacccattttttcatttttaaaatccttgtaggctgtattaactagtttgacggcagcaaatctagaatattggccttttttctttaaaaaggcacccattgcatatctgaaatgttcataccgtaattgcttagctagaatttgttggttctcacaatgtaacttcatagtttgccaacgattacgataaccatagtagtccttccagccaattggacgattaacaccacttgctccgacactattattatctgttagatgataaatcttagcttggatattattgatcatttctgtttccttgcgaatacgaagtgagtattcaatgtcatcataccaaataaagaaattcttttccggtaagccaatcttctttagcacatcttttctcaaaaaaactcctacaaaagtagcaatatcaactggaaaattaccttcatagctcgttaagtcaattttagataattgtagccggtccaaatcatcaattttaacacgatgttcggttccaatttcaccatcttcgataacagttcctgtaaaacaaccgatatcggcatgtttttcactaagttcagccattttcttcatataatcttgatcatagactgcatcatcgtcagcgatactaatccaatcaatttcaggcaactcaagagttgccgccaaggccatattaaagccacctgcgccacccaaattatcttctgaatgaatgactttaatttgtgcgttatcgcgcgcttttgctttcaaaaaatctagcgtatcatcagttgattgattatcaacaaccactattttttcaactggcgcggactgctctaataaactatcaatcgccttttctaatttatccctacgattatgggtcacaataactgctgcaactttcaaattcttatccacgctttcttttaaacaataaataatttaataaatagaaatttctctgcttaatcagtaatcctaatagtttctgtttcattggcatattgactaatctcgcattttttatttgcttactaacaacaggcgtttctagataagtcttaaactcattttttctttcctgatatgacttagagttgcttagattacaaaaatctgcaaacaagagttcaatcgagagtctcaacatataagaatccaaaaataatgcgttatctgattgttgtaaccaatctactaaatcatcgttcagatcattcgaaactgtaatgaaactttccttaaccccttgtcggtaactattactaattgaattatcatgatcaattctatagtgatacagtatcgaatcaacaatgttaattctagggttcttcaagaaaacctcaatgctaaataacgcatcttctctcttaataattcctgctgggtaaaataattgattagcttctaaaaaagactttcgaaacattttggcccatggtgttccaagaaaatatccataaatgccattataataagcgccatccgaaagcgttgcacgaattaaatcatccattgataccggtgtagcgggaaatagcttatctttaggaaaactattttcaactttaccgtcttgatatactcgatcaaaaccaaaaaagataacatctgcgttagtacttgctttttctaacaatatttcttcaaatttctctgctaataagtcatccggatcaacaaaaagcagccaagttcccttagcagctttaatccccgtatttctggcaaccgatacgccctgattagcttgttcaatcaacttaaaacgcttgtcttcttctgaaaagcgtctacaaattgctactaaatcatctctagcgccatcacttattagtaagaattcaaatgaagttgtcttcgccaactttaagcgttccaacccagcctctaaaattgaattttcagtaccatagattggtaggatgaaactaattgtctccatcaaaatcctcctaaattttcaagtaactcttattagaataatctgcgtatgagtcgattagtgcaaatataattggatatgctagttgtaagctcaaaccagttgcttgaatcatatttgaataaatagttaatgcaaatattgtatttaagacggataacccgacaatgaaaaatcttgaattcaacttatataagaagtacagatacacgtatgcacccgcaaagataataatgacgtacatagtaacaccaatccaccccaataaacggtaaggactacttaatgctgtcccgacattcaattctggtgtaatttgttgaattttgacctctttataatctgaattagcaagtgctctcttaccaatgaaattgggcagtaactcaccaaaaaacatactatttacttttgaaactgttattttttcagtagtcttgctataatctacatttttttgaaagttagccacgggtgatgaagcgtaaatataaccccaaaagaactccttaggaatcttactacttttaaatttttcagttgcaccaccgatttgcataattgacgctgaatcaaaagctgatcgaccattttgatatgacgtgttcactcgtgcatttcccataacaccaaataaaaacagacccaccataccgaaaatcgctaaaccaattatatgtctaactttaattttcttccagattgctagaataaaaatggtaaaacagtttatcatcaccatcatgaacattccgcgattaacttctaaaacatacggaatacaacttagaacacaaagtagtatatattgatttctcaacttcccagttgaagagaggattagatgccacaagtaggttgttaaaaaagctgtcagagtgagtaaaaaaacgtgaactgtcggaattccaaattctgtataaccggaatccttaccttggagcataaactgtaatggaaaaccatgattgtaggctccttcagctaatgtgcctattaaaacaataaccactaaccaaacaacatttgttgtactcttaattttcttaaaagatatcacattacttttatagataaagtatcctagtacgccggctaacaagaacattacaataaaaaagaaaataacatcactcgaaaaacttggataaatactggaccagccaaaaaagaaacttagaataactgctgaaaaagccagaatgaacataaagaacggattaaccaaatcgttccctcctaattctttctacgcataacaataaaatgaatagcactgaggatgaagcccaatactgcaccatagatgatgcccataatagaatttgttttcttattactaaagcctattgttgcagttgtatcttttgaagcctggtcaatcacaactaacttactcttctcgtcatcatacttgatcacttcttttttcaaaagctctgtcgcatacttagcacctttaatactcttggcttgcgtagcgccagtatatttcacagctatgactttagatccgttgctactatcaattaacaaattatcgcttgaataatctctaacctctttagtcatagcctttttaaagctttgtgtcttacttaaactattaattgattgccaaaaacgctcaacatcgttatcaaaaataccgttaccttttttgtcttcgacataccccttgttaacatatactttagctgttgtttcgtaactaattgttgatttggcagtcatgatcccaacagcgccaccaatgataattgttacaaaaatgacccaccaatattttttaaaaacaacacccacagatttaaatcccacaccattttccatttaacttaactccgtttcttagtaatttaaaataatctattttattgtagcataaacagtgtctaaccactattcgttacctgtaaatctaaggaattctttaaagatttctagactttataaaatcttcaattattagcttgagattacaatggaaagcctctttaaacgaaactgcaaccattttttgaaacaaataaataaaagtaaaattaggtaactacgtgcgccaagtataaactagcacgtcgcttttccagcctaaccaccactcatacctaagtttaaaatcctaatgcattctagcttagtttcataggggtatcaattattagccaaattaaaaacacttccgatttaaattttatatttatcgaaagtgcctattatatatctgtatccaattttaacttcagtttctcacggataacctgttattgtctacaaactcattaaactgtatataaaataacacagaaagctaggccaccaattccaattaaaatgtgcgttaaaatttgatattctttctttttctcaatttgatcatataaatagaagcaaccaaaaataagtgcctcatataaaaataggaatgttcgttctcctgatgcccaaattgttggtgaaaaccccatcatgattctcgaaataagtccgagtaacatagctaccataactaaccacattcgtttagagtttcccgaagaaaatatccccaataaaacaatgcagcttactacaatcagaagtaaatctggcaagatagattgtaaattggccaaagagatatctgtcccataaatagtaacagcaccccccattttctttaatcctggataaatttttccaatcaaagtatctttaaaccaaaaaatcacgctgaacagtaccggaatatagaaaactgtacgcggtattttatatctccccttctgatttatataaaacgcaaaaagtaaaatcacaagtattgtcgcaagcacatcaaatgaaaaaaagaagtgacctaatgtactagaaatacctaactcaatttttttaaagggtgacaaagttggaaataatggtaaccaatgaatttctttgacttttctaacgctatttcctggtgctaaaacaatcataatcaaagacaatacagtaactacgaattgaaatgccaatctccccagtgcctttttatttcctcttgttacgtacaataacaatgaattacccaataataggataattaccatttgttcttgattaacagcatagattaaggctaagaaagcaacaactgaaattatttttttatgtttaatgtctattcctaaatattgagctaaggaaggtagcatcgctaataaaccggcagctaaaacccataggtaattggttgtggttgccatccaccctgtctcgtagaacatattgaaaggtaataagaagaacatcccaaaactaatcaatagacgactagcattctcatcatcatcagttcctttaagaagcaatagatacgggatatagataacagtaaacattgccaatgtgtttaataatcgccacagaattggtaagtgcgttaatgttgataataccgattcaattactagtcgagaagaccatcccgtatatcgactatgtaaaaattgtagatagtgttttcctagaacaaattgagcaaacgccttatcatcgccaccattgggtgtgatcccatttcctgttaaattaatcgataaatttagcgctattaataaaataacaattaaaataatcgcccatatttccttttttttagttattttctccatgtgaaatcctccaacttttttgacctcaataccatgattcctaaactcatagtatccatcttattattattgcatgacactagtcagtgttgtacctatttccgtttaaaatccaaaatcaacctcaacataacagccatatttgctatgcccgcaatgatcattactaaccactcatttttcaatggttttgcaacaacacaaagcttagccttttttttatttactaattcgttagaactaattgcgattgttccgtatgtttggttatgaatccattttactgtctgtccatcaattgtcacccgatagttaaatctattataggctgctactggcgtcactaaatatttattcataactacgtgtttgatcctcatatgatatgttgcactattaaaggatggcactgaatttccaaacataatcggtcctttaatatcactatacgcagctttaaccgcatagtccacaccgctttttggtccagaaaaagccggaaaataatcaatagtatgcagctgattattatacccactttctaaaatattagtcggcactatctcctgataaaaattctgagttctataaattgtcatcataccattaattagaaagattattattggaacacttattagccatttcgcccacaacgccttgactttaatcatcatacgcataaccggtaccactaagaatatagccgctaacattaataatctacccaaaaattgaattactttaataggctcaaatattttaaggtgttctgtaaaatcccaattcacaaaatcgaatccaccaatcactagtaagagtccgataattcctacaaatgcataataaccgtcgttatcttttcttcttacaattagataaataattgcaataaaggccaatattagaaaaagggtccctatattccatgttcttgcatttaaatccgtaagcgctaatggatgaagtgtatgctttaagtccacaatatatgtttgcggaaagatagaagattcatttagaggtgccgaaatattaggtgctaagtatcgattatgcatacttaacactaaaaaattataaatagtaactgcagacatcgggattgtcaaagccgctgcaatacaaatataccgagcttcttcccaattaaacttctgcattaataatctaactatttcagccaatattaatactacaatcaaaaacaacaaggatagaatatgtgaattagcaattagcgaaacacctaacgcaagcaaaagtattccaactttttgacgtttccatatcttaacaattccccacgccaccaatggaaacattgtatagccaagtagttctcctaaagcaaatctcttatatgaaagtactaggtgataattattaaataaatataaaactgcaattgaagacttgatccacaagttattggtgaattccccgataaatccaaaaatatttgcagaagcacaaatgttaaataacaaagcgaatataaatacttttaatctaagttttatcggtaataatagcggccaaataaaaagatacaaggaaaagaaaggatacattgaattgactcccaatccctgtgccgaaaattctaaaaaattaacttctacaggcagctgatacgcctttaatgatcccagtaaacttcttattctagcaaaatgaaacgtccaatcctcaccctcactacctctaactactcctctagtaagaaaaaaaggaagtacggctcctatgtcaagaatccggacataaaagtacgaacaaatttgactttcaatttaaattacttaatttaattttcagaggccgaagttttagtcccgttcagattttaaaaacgctttagagtatattaaataagccccaacattattgaatttaatagcctgtagctacgctacaagtgaaatacgatcactgttataccaacgaatatagttatcaattccggcgattgctttatgaattgtcttaaaatcttggaaattaacgtattcacgtttcaaaattgaatgaaaactttcaattcgcgcgttatcgccgggctgaccctttcgggagtaagaatgcttgataccatacttcgataaagtgttttcaaataagtcacttgtgtattggcttcccatatcactatgaataatttgtggtttaactgcttgcgccatgacttgggtaataacgttagtcgctagttctttagtcatctgcgtattaagttggtaagcaataacccgtcgggttactggattatagacactagctaggtaacaccaagtatggttaaggggaatgtacgtaatatcagtcaataaaataccagattgatcagttaactgcttaatcaagtttggtcgctgatcataatcagtctgagtggttggcttattgattcgtttaaccattctagatctaattcctaattcacacatttgttgatagaccagacgctgactaacgtgaatatcagactgttgatttagtaagatcgttaatcgtgggtagccatacattggatatcttaaccaagccgttaacacttcttgtttaattaaatgccggcggcgttcagttctacttggctgccaatgtagataatcatagtaggttgagcgcggaattttgagtactgataagatacgcgtaatgcggtgcccagcaagtaaattagcgttgacgacttctaacacgagggcacgccctttaataattagctttttgccatgagcaccgctgctcgttttaaaatatcaagttcttcttttaaccgtttattttctttaatcagagcacgttcatttgatgatagcactttagtgttgttaggatcagcttgtttaatccacttagtgaccgttgaaacactgacgttgtattctttagccagtgagttggccgaacggccagtctgacttaagctaacaatcgattctttaaattcatttgaatatttaattgccataataaaaagctcctttatgatgtattatatcgaacagtttgtccgtaattccatcataggagcctactaccaatatactaattcctaaaagagccataatctctcttagtctttttcgatcaatccattttaatcttattctgctctctgtgttcattacctattccctactaactcttttttctagttgctgtttaattccaaaaaggatcaacattaaagctgtcacgcttgttattaagaaaccttctttaataccttttggaatatatcttagttttatactgctctttcctgattcaactggtacttgcataaatccatgattatcctcaagtaacacggatttcccgttcacagttgctttccaacttttatcaaacggaatcgaaaaaaagacaggctctttatgtttagcattcacttgtaattcaatactattctcactcttttttataacctttggagcttcttttcgtaacttttcaatattctccgttagggcatctccattaagtagtataaatttaggagattctgcgatatttacatttccttttaagcgcattttaacaaatgcattacttttgtgattggaactcttataaagactcaatacaccttcattatgaaaattaggataattatttcgtataatctggttagttttaaaatctaatttaccataagaattaacaccatcaattacagctatcttagtcagaagttctgaattagctggcatatcaatccgatactcaatataagcattcttaccatatgggctcaactgaatgccattatttttttgctttatttttacgttatgaacagtaaaatttggattatctattgttcgaatgattgcacttcttttatttttattaaaaaagagaagctgccgctgtagttcatttccttcgagtggttgattaatggttagattgtcattaataattgcgatcggtaaagcatttttattctgatacacttcatagtttccactattgaacaccttctggtatccaatagaagtcatagaatcattcatcaatgctattctatattttagccctaataaactatccacaatcgtatttccttcttgatatgccagtgatttattccccaaagtagtactatatccaaattgagataacgttgtagctaattgctgatatccaaaagtgttaaaccaactaaacccgttaaaattattgtacattccttggtttagcattgcatttggcgttactacagttcgatagaatgttcggtcctgctttaaataagataaagcagtctttaaattttgactgtcattttctttccaatttttttcggtagcgacgtatccgggtaagctatccaactgactaataacaaaatgcatattttgaatactatctgtcataataagggctaacgttaaccacttgattatatttattcctatatttttatagaaaatatagccaatcaatatcattaaagtaagcaaccctaacattacactattgataattagtatcccgttatctattacctgctttttatacaacgttaacaatattatgctgcataatagcaccgcatataccaatggttttagtacattttctaagccgatattaatcacaaaaccagtgattaatatcatcattaaactgattaaaaaactaaatctgaatccataccctgtgggttgttgaaatccgtgccacattacatatggatattcataaatataactaattaagaaacaaatctctaaagcgctcactatcacttttattcttatttttattttgggtataaaataaaaagctattacagcaactaacatcaggataccgcaatatatattagcgccatcaaataattgcgtattatggctaaacagatcagacaatgctatccagatactctgcttgcgttgcaagaatccaacttgcaagggtattttgggtcccgatttcaatgcataattaattggtaaaattagccacgctgataacccaaaactaagtattaccgaaattagaaacttaatgccagatttccatttcactctattttgaaggactattaattctactaagaaatatataaaaataccgatacctgccatatatgccatatagaaattagatatgaataacagtgttaaagtgcctgttagtagccatatcttacctttattgatcaaatgatcaacacccattaacgcaattggtattaatattatgctatcaagccacattacattaaatgcataaataatattaaatgacatcaaagcatacgctatggacaatcctaagcgataaacatagtctaattttattcttttattgataaacaaataaaatgtaatacctgaaagaacgattttagatatgattagaattgtcataaaaagcataatttgactatccttaaaaaggacaacgagaaaacttagtgggctcattaagtaataacccattattgtaaagaaactgcctcctaatcccaatttaaaactataaagaagtgttccgttatgtactagttgctgtcttaagtatttgtaaaagatactatactgcgtataactatctgctcgtatccataacttattaccaaacggatatagcccctcgtaggcagacaatcctacaagaatagctaataatattattattaataacattacactcaaaatagattttctatttttactcatgatatatatatatccccctcgggctttctttaatataacaattaacatgataccccaatattgccattaatagtccactatcttttaataaatggcagattgtaaaatttaagttgaacatttaagtggacagaaaaacccatcaaggtctttaatggtgttaccacacaatccattagaaagaaggaccttgatgagcaccactattttatcattccagaaccgtgttgtcattgaaacgcttcataatgaaggacgttccttgcgatacatcgctaactacttaggctttagtaagaccaccatctttaacgaacttcaccggctaaatagtgagtaccaggctgggctagcgcaaactgactttgaacgaaaggttagtcaacgggggcggaagtcttcgctcactaaaaaccttaaacacttgatcgaggaaaagattcaagtccagaagtggtcccctgaacaagttgcccatgtggtggggattgcctacaagacggtctataactggattgatcaaggatggcttgatatacagttgcccgatttgcctgatcatggaattcgtcgtcatcgtgctaaagaaaagcgtggtacgttcaatcacggccgctccattgaggagcggcctcataaagtcgaaactcgccaggaattcggccactttgaagctgataccgtactttctggtaaacgtaaaggtcaagctgtggctacttttgtggagcgtaagagtcgcctgacaattgttaaacggctccatggtcgcgacagtcagtccatgactcaagccgtacttgaactagctagtcaacttcaagacaagctcaagacgcttaccgtagatcatggtaaagagttcgctaactatcagacaattgaacggcgaactggtacacaggtttattttgcccatgcctattcaccgcatgaaagaggcagtaatgagaaccgtaaccgagttttgcggcgctttattcccaaaggccaagccattgaagaactaagtgatcaccaattggttcaaattaattggtatttgaattcacggccacttaaatgtcttaattggcatacaccaatcgagatcttcttgcttaatttacgtcattaaattcgttcaagttatttcttgcaatctgccaaataaaaaaacttcgcctacacttaaaatttcaaatcccttgtatctcattagggttctacaattttaaacataaacaaagtttttcaacttttatcatttaatattcaacgaattaataaattgataatccacatatcggccttctccactattactattggaataacgactgattaaataaatattcttctgcttcagtttagcatcgagagaaactttaatatcgaagccactctgcgccgcattatcaacagttggatagacagctgcgacatcatttcgagtaatcctattaatgcgaacccgtccaatttctttattatttgctttattcattatgatgataaaattattatttaagccttgaacgttcttagaaatatgccatcccgaaatatggaggatattaccattttggataagttgatcaatacttcctaaattacttgggccttgtggtacgttaacaacattaggaaattgatagtcaacataatcactgttaccattcgtggtacttgtatagcgactaataacgtagaaattcttgccttctaaactcttatccaccgctaattcagcactaaaaccactcataccagaattatacacattaggatatacactatgaacatcatttctcaatgaattattaactttcaagcgcttaatttctttattagtatcgacattcattacaatcagataatgcgtattttttccttgtgcataatcactcgcatgccaaccattcattgaaattttatttgaattaactttaacgttatccaaactacctaaattttgcttagttggcgcaggaacttttacagtattaccgaaatcaaagtcttttgcactcccttcaccgcttggtaattgtgcataacgcgatataaccctataggtatgtccgtacattcctgagtctactgggatgttggcattaataccactcattgctgccgtgttaatagacggataggcatttgctacatcatctctcctaccacgattaattgcaatccttttatgttcttttcctgtattggtatcaattagaattaaataactgtacggtaaattattggcatcattaattgcatgccaaccaagcgcaaggatattattgctatttgcagttaattgatcaaggctaccgacattatccgttacttctcgatcccaacttgttaatccatactgctcaatcaaactgtttaacaaagtatcatagttaggcgctgtagcataaccgtcttgtttcaaaagactcgttacctcacgataattagttttccacaacaaattatgatatcgtgaatttactgccaaaaagttcccatgatcttcgatactttcattccaactattgtattttctaaattgcgcattaactgtaatccactgaccattaatatattcttgagtgggcattgttacgtactgaccattgtatgttcccttaattccaaataagttattaccatacgttgctaaagtcgattgcccccaaccgctctccaagattgcctgcgcacctgaaacagagggtaatacaccatacttgcgccatgacgaaattgcaccatcatgaatactactaataaaactggaggtatttcgtaataaattcattgaagctctggaggtatttcgtaataaattcattgaagctggcgtacttctttgacttactttaggcgcatcataaaacccaggaccaatttcattattttgctttacagtaacttcttccttgttctttgtttctgctgctgattcactatttttaattacaccggattcagttgaattatcggtagatggcttttgttctttagaactttgactacttgctgatataatactttcattactgctcattaatgcaggggctgtctcttgtttttgttcagccgctgatactcgttgatttgttgttaagccaattaaaccaatcgtactcattaaaatactattcttaacaatttttttcacttcacaagtcgctcctagttagttttttcagacatactaataatacaatacaattacttaaaacactatttcgttttagttacaaataaaaaccgaacatcttatccacacggttaagacgttcggcaatattttttagatgttcaaggcattgtcaaacacgtaatcaaccgtatttccctcacctgaaggattatctgaataacggctaatcacatatattcttttgttaaccaaactgttatcgatattaaacgttaaaccaaatccactgtttttagagccgtataatgttggatagacagcagctacatcatttcttaaagaacgattaattttataacgccgaatttctttgtttgttgtcttatccataataattaaataactatacggtttattaatcgaagcattagcagcatgccatcccgacattattacggtattatttacacgagacaattgatccatacttgcagcactttcaataacttgtttcttaggaactccaatttgattaatgaattgataatccacataatcagcatcagcatttgccgttgctgaataacgactaatgaagtaaatattcttgccttgtaattgactgtcaactgggatatctgcagaaaatccgctcagccccgccttatatagatcgggataagcagcagctacatcatttcttggtgagttggcgatagtcatccgtttaatttctttatgtgtattagcatccattacaattaaagtgtgaacattacggccttgtgcattatcatttgcttgccaaccgctgatgtgaacattattgaaacttgccgttagggtgtcaatactccctaaattttgtttaacaattgctggtactgttacctgattatcaaacgaatagtctacgtatgctccttcgccatttggtgtacttgagtaacgtgaaattactttatacgtattaccgcgcatatcatttgttactggaatactcaaaccaaacccacttttttctgcattggcaatattcggataaacttgtcgaacatcgtcacgttgcgtacggttaattgcatagcgcttatattcacggcctgtcttagcattaattacaattaaataactgtatggataccgactagaatccactgatgcgtgccaaccagacattgataatgtcttcttatcagcagttaatgaatccatacttgctacactggtttcttgcttaggtactttaataatatttctaaatgtgaaatcaacagtgtcggtattaccgttgggatctgacgagtagcgagacataagaacgtaactcctattatgcatattattatctaatgtcaatgtattgttaaatcctgaatgtaatgaattggtaatgttttcataaatgttatgcacatcttgacgatttacacgatttattttataccgttttacttctttatgtgtcttactatctaataagaataggtagctatatggccgattggctgtttgctgtgctgtatgccaacccaccacatgaatttcattttcagacacattaacactgttaaggctcgctttatttgcaggcatttgatcataataatgttgcactaatgcataaaattgattcatgtcatacccatattttgcaaagtaagcatctggatcagtatggtctgttccaccaagatattgtgtaacattatgatgtgaccagattgtaccaaccccattatgattctgtgccaaagatggcgttaaattatatttgtttaacaagtaagcagtgtaccacgctgagtaactcgttgtcttagcaaaatcttcgaagttacgagccgttaccatttcaaattgggcaaaatatttattaccaactgccccactaccccatgcaccataatctgtatcatgaatgtttaatattgtcctagcatcaataaaggtatgaacaaatgctgattgccacccaccattaatctcatagtctgcttcactccgagcactataattattagggttatcagtataatgaacaaccactccgttaggacgattatcatctgttttataattaaatattgagaatgtatgcaaatcttgcgtaatgtttggatgtaagtagttgtgttgatatatataattattgacacttggataacctgctttaggcataatcgcctttttaaccttagatgaatcaataggcatcccaatatcgtcagtcttcgcttttttctcttttataggtgttgcttcttttgtatcttgactatttagttgcgttttcatttcatctggcgttagcacttgtccagcttgaacattgtttgtagcaaacaaaaaggtcgccgagaccattgtaaatccaattaagaacttcgttagttttctattcattttttcccctctagaatccttaattaacttccacgtagaatattaacataaactttaatatttttacagtctgttcagcattattaatcatataaacatttattggctattaatcaaaaaaaacgtcctgaaccttatcggttcaggacgttttaattatctttccaaataaaactcaaatcgttcgcccacatattgggtgcggacatattcgaaaggttcgccgtttgataagaaggaaacttgtcgtaatttcaagattgggccattacgcttaatgtcgagatattcggcaattcgttctgaggcgagttgggctgagacggtttgttgtgcaccgcccatttcgtagccccctttttcggctaatgctttatagaaggaagacgtgatttcagctttactgaaatcggcaactaagctttgtggcacggttgccacttcaaaacagatgggcacattgtcggcatagcgaatccgttccatgcggagcacctgctcgccatcttttaactggagcttttcagcttcgctaagtgatgggttggcaatgtggaacgaaatggttttactagatggctgcttaccttgggcagtcattagatcggtaaaactagtgacgccggacattttttcttgcaccttttggttagcgacatatgtcccagccccaatacggcgttccaaaattccttcgtcgaccaatgtttgaacagcttgccgtaatgtcattcgtgagacttcgaaatttaaagcaagctcccgttctgaaggaattcgatctccaatcgaccacttgccggcttcaatatcctttttaagttgattatgaatttgaatataaacaggtgattccatgggacacactcctaaatattaatgttgatagccgttcccaaagctgtaagttgcgactaagttttgctgatggtctaagatgttgaaatcagcatcccgaccttcttctaatttacctttttgtgttaagccaaattcttcggcttggttgacacttgacatcataacggcttcaaacgtttcacaacctgtgaatgtttggatgttcttgaaggcatcgatatatgttaacactgatccggctaaagtgccatcttctaagcgtgcttgtttgtctttaacaatgactttttgaccgcctaattcgctttcgccttcagcaatccctttagcccgcattgaatcagtcacaaggtcgatgcgttctgcacctttttgttcgtaagctaatttaatcatgtcaggcacgatatggaaaccatcagcgattaattcagcgtacatgttgtcttctaacattgcgtgacctgtaacgccaggttcgcggtgcttgaattcacgttgggcattgtataaatgggtaacgtgcgttgctttactttcaagcatttgttcacgcgttgcattactatgaccaactgaaggcacgatgttgtgtgctaagcagtagtcttcgaatgcttttgaaccaggatcttctggtgcataagtaattaaacggacacggttacctgataacttattccattcgtccaataaatcaacgtctggatctttgatgaattgttctggttgagcacccttgaagattggtgcgatgaatgggccttccaaatgaacaccttgaattaatgggttcttttcagccgctgctttaacaccgcgcatagcattagcaatgttttcgtttgattgcgtcatcgttgttgcaaataaggttgtgaccccttcattttgcatcatcttagttgccatttcgtcgatttggtcagcatcgccgtccattgcatcaaaaccataaccaccgtgacagtgaacgtcaataaagccaggaatgattgtcttgcctttaacgtcttgaatttcttcgccagcttgtgccttgtagtcgaacattgggcccactgccaaaattttatcatcgaaacgaatataaccgtcttcgataacgtcgtcacctgtatagattaccgcatgttttaatacttttactgccattatccatccacctctatctttaaattacctctagtataaatggtatagaccaaaaaaacaagggattccgactaaactttgaaccgttttcttgttaatttgctatactatatttatccattcatattaaggagtttaacgatgttaaaaatcggtgttattggactaggaaacattgcacaaaaagcatatttacctgtaatggcgcagatgcaagaccgggttgattgggtcttatgtacgcgccaaccggctaaattagcgcagcttcaagcgcaatatcatttagaaagtggctgcctatcatttgacacattactcgaacaaccactcgacgcagttttcattcacaccccaactgcaacccactatcaatatgttaaacaagccctgctccatggtttacacgtttttgtcgataaacccttaagtgaaaatccactggaagtcgccgaattatacaaactcgcggctagcaaagaacggctcttaacggtcggcttcaaccgccgttttgccccatttttgcaaaaattaaatcacttacccgataaacaactgatcaacatcactaaaacacgcgtggcaacgagccaaccaacgccctttgccatttatgacctgatgattcataccattgatacggcgcttttcttggctgattcactaggtaccaattacaaaatccgtccatactgtcagcaggatgcaaacggcaatttacaactcgcgcaattaaccattgaaacaccgcgccaattaatcagcgcgactttaaatatgcaaagtggtaccaatcaagaaattgcaagtctccagacaccacacgggttattcactgtcgataatctaacgcgctacacaacacaagcggcagaagacagtcgtattcaaactgcagctgactggacgcctacgcttgaaacgcggggctttgcgccaatgattgatgcgtttattactgcccttgaaactaacggcgcaaatcctatcccactagaaagtagcttactcacccaccaactctgtcatgagatggtccactttacaaaataatataaaaaagcgtaacccaatacagtatttgtatcaggttacgctttttacatgcttgagagcactctatttttggctttctaaatccttcgcaattgttgcgtcgatgcctttaaccaccgctgtcattaagccggcttcttccattgctaacaagccagcaacggttgtaccacctggtgatgaaacttgatccactaagtcccaaggtgaatcatcactcataagcacgttttgggcactccctaaaacggcttgagctgcaatttcggttgcggctttctttgttaaaccgtgtttaacgccggcccgcgccattgaatcaatgaataggtaaacaaatgctggtgaactaccggcaagcgcactgaaagttgtgaaatctttttcgccgatttcaaccacgccccccagttgtgcaaggacatccttcacccgacccaattgctctgcattgacttgttcgttaccaacaacagctgttatccctgcgcgattggccacgttaacatttggcatgatgcgtagaattggtaaatctgcagcagattgttctgctaatttatcaagtgataaacctgctgccattgaaaccatcaatggttgatgtgctttaaaggctgcatttgtttctgctaaaacctgtggcacaatatatggttttaccgctaaaaaaacgatgtcggcttgttcaaccactgaattgttatccgcaacagctgtaatccgttgttcagctacaaaatccgcatagttcgccggatgtccgccatgcactaaaatatccgttgttgcgacttgattagctttcactaagcctttaatcattgcttgtgccatgttaccgacaccaataaatccaattttcattctgccacccctttttttatttatccaaggataccgaacgagcggaggaaagtcaatccaggacacaaaaaaagacatcttagcaagatgtctttaaagtattgggctagctggattcgaaccagcgcatgacaggatcaaaacctgttgccttaccgcttggccatagcccaatcaagtggaggagagtggattcgaaccaccgaacccgaaggagcggatttacagtccgccgcgtttagccacttcgctactcctccatacgtttcatctcatcgattcaactatattagtttacaaaattctgacagaaaaatcaaccccaaaatgcaaaaaaaatcttgattattgcataaataatcaagattttttctaatatttagttaacgccttccattaacttatgaattggtttaacgaagaagattaagacgatcccgaagatggcactcacaatcccaatccctaagaaatatctaatttctgtttgtggtgaatataaacgcacaagctgtgcattaattgcttggcccgcagcatctgctaagaaccacatactcatcatttgtgattggaatgcctttggcgctaattttgttgtaattgacaacccaattggtgaaattaacatttcagcaatttcaacgatgaaccatgaaccgattaaccagaatgggctaactcggccagcggtaccgtgtaataatccaggaagtgccataaacatgtatgataaaccagcgaagattaaaccaacagcaaacttaccaggtgcagatggttgtttcttccaagcactccataaccatacaaagaatggcgttagaagcataataaatagtggattcaatgattggaaatttgatgcagctaagctatgcccaccaatgtttagaattgtccgatcttctgcaaataaggctagaacaacggagccagattcttcaattccccagaagatagcagctgcaataaagagtggaatataagctataacgcgtgaacgttccttcttagtcactttcttgctgcccaacatccgtgagaagtacacaattggtaatgcaatcgcaatgattgaaatcatcaagacgatgttatcaatgtttaagttgcctgtaaattgcatgcctaatactacggcaacgacgaccacgacaccaatcacaattttacgaataacgcttgataattcttctggcgcaattggatcattaggttttgaattttctttactgaattgagaacgaccgcggtagtattggattaaaccaaagaacatcccgacagcggctaatgagaagcctaagtgaaaatcaattttttgaccgacagccccaacaagaattggagcgacaaatgagcccaagttaatcccgaagacgaacatactgaaaccagcatcacggcgacgatcattttcactatacaaactaccaaccatttcagaaacgttaggttttaataacccagtccctgcaacaatcaaagcaattgaaataaataaagctgtcgcacccatcggcattgctaaggcaatatggcctaacataatcaagacaccaccgatgaagacggttttgaagctcccccagatccgatcacttaaccaaccaccaacaacgctggctaggtaaaccatcgaaccatagattgccatcacagacattgcagtcgtcttgtcaaagccaagaccacccttatctaaagcaaaatacatatagaataatagaattgcacgcatcccgtagtagctaaaccgttcccacatttcagtgaagaacagtgttgatagcccatgcggttgcccaaagaatgttttttcttgtttctcttccattgtaataccccactttaaaactttattattacggaaactaagaattcgatagttattaaattgaatcgactcatctatacaagaagtctcttatcattcgcttagaatctataagggctattataatcttattttaatcttaaatcaattcttttttcaacattaactgcattgtttgcactgattttttcattaaaataagttattttatgattcaaaatgactaatgcttattcttaaatgagaaaatgctcatgatacctaacatgttcttagaaaactggtttgttgcctttaaacagtagtacaatgaactaatagaaagcgagctgattccgatgaacccttttacactaacatctcttattccattacgacctgatcgttggctaacttactacgaagcaatgtatcaaaatgaacacggcgatttaatgccttatcattttgtcagtcgtgactctaacttaaccatcgagactttaaaacgaccagctaatgcctcagcggttgcaatgttctgctacaatcaaaatcactcacaggtcttactgactaaacaatttagacagccccttaatgattttgtctatggtaatcccgccggtttagttgaaccaactgagtcgattaaacaagccatttcccgtgagttaatggcggaaacaggttactctcttattgaggttgaacattgctttgcgccaagttattcctcaccaggccttactgatggcgccgttagtctagcaatctgtactcttgatcaagctaaacaaacagaccgtacacttgaagtggatgaagccttaagtaccctgtgggttaatcgtgctgaagcacagacgatcttagccaatgaaaaaatgactggacgcactcagattctattatggcaatgggcaaatgaacaataagtaatagccagttacgattttcgtaactggctattttagtggttgcttttcaatcaaattgaatattaaaaaagcattatactaacaaaacgtcagtacaatgctgattatcccgattagcacttggtagaaacatgctattgatgccggctgcaggagtcgaacctgtgaccctcggtttacgataccgatgctctaccaactgagctaagccggcattattgatgacccgtacgggatttgaacccatgataccgccgtgaaagggcggtgtcttaaccacttgaccaacgggccgaaataaaaaacgattgaaaattctcaaccgttcaatgactccggttgtcaggctcgaactgacgacatcatgattaacagtcatgcgctctaccaactgagctaaaccggaatga

(The sequence listing continues in the following parts.)

1. A probiotic composition comprising isolated Lactilactobacillus species, said Lactilactobacillus species comprising a first Lactilactobacillus curvatus strain and a second Lactilictobacillus strain, and a carrier suitable for animal administration, wherein said second Lactilactobacillus strain comprises at least one of a second Lactilactobacillus curvatus strain, a Lactilactobacillus sakei strain, a Lactilactobacillus fuchuensis strain and combinations thereof.

2. (canceled)

3. The probiotic composition of claim 1,
(a) wherein said first Lactilactobacillus curvatus strain comprises any of the following strains:
Lactilactobacillus curvatus ELA204093 corresponding to ATCC deposit PTA-127116 or a Lactilactobacillus strain having at least 97% identity, 98% identity, 98.5% identity, 98.6% identity, 98.7% identity, 98.8% identity, 98.9% identity, 99% identity, 99.1% identity, 99.2% identity, 99.3% identity, 99.4% identity, or 99.5% identity in genomic sequence to the sequence of SEQ ID NO: 1,
Lactilactobacillus curvatus ELA204100 corresponding to ATCC deposit PTA-127117 or a Lactilactobacillus strain having at least having at least 97% identity, 98% identity, 98.5% identity, 98.6% identity, 98.7% identity, 98.8% identity, 98.9% identity, 99% identity, 99.1% identity, 99.2% identity, 99.3% identity, 99.4% identity, or 99.5% identity in genomic sequence to the sequence of SEQ ID NO: 2, or
Lactilactobacillus curvatus ELA214388 corresponding to ATCC deposit PTA-127118 or a Lactilactobacillus strain having at least 97% identity, 98% identity, 98.5% identity, 98.6 % identity, 98.7% identity, 98.8% identity, 98.9% identity, 99% identity, 99.1% identity, 99.2% identity, 99.3% identity, 99.4% identity, or 99.5% identity in genomic sequence to the sequence of SEQ ID NO: 3, and combinations thereof; and
wherein said second Lactilactobacillus strain comprises any of the following strains which is different than said first Lactilactobacillus curvatus strain or strains:
Lactilactobacillus curvatus ELA204093 corresponding to ATCC deposit PTA-127116 or a Lactilactobacillus strain having at least 97% identity, 98% identity, 98.5% identity, 98.6% identity, 98.7% identity, 98.8% identity, 98.9% identity, 99% identity, 99.1% identity, 99.2% identity, 99.3% identity, 99.4% identity, or 99.5% identity in genomic sequence to the sequence of SEQ ID NO: 1,
Lactilactobacillus curvatus ELA204100 corresponding to ATCC deposit PTA-127117 or a Lactilactobacillus strain having at least having at least 97% identity, 98% identity, 98.5% identity, 98.6% identity, 98.7% identity, 98.8% identity, 98.9% identity, 99% identity, 99.1% identity, 99.2% identity, 99.3% identity, 99.4% identity, or 99.5% identity in genomic sequence to the sequence of SEQ ID NO: 2,
Lactilactobacillus curvatus ELA214388 corresponding to ATCC deposit PTA-127118 or a Lactilactobacillus strain having at least 97% identity, 98% identity, 98.5% identity, 98.6% identity, 98.7% identity, 98.8% identity, 98.9% identity, 99% identity, 99.1% identity, 99.2% identity, 99.3% identity, 99.4% identity, or 99.5% identity in genomic sequence to the sequence of SEQ ID NO: 3, or
Lactilactobacillus sakei ELA214391 corresponding to ATCC deposit PTA-127119, and combinations thereof or a Lactilactobacillus strain having at least 97% identity, 98% identity, 98.5% identity, 98.6% identity, 98.7% identity, 98.8% identity, 98.9% identity, 99% identity, 99.1% identity, 99.2% identity, 99.3% identity, 99.4% identity, or 99.5% identity in genomic sequence to the sequence of SEQ ID NO: 4; or
(b) wherein said first Lactilactobacillus curvatus strain comprises any of the following strains:
Lactilactobacillus curvatus ELA214002 having the genomic sequence of SEQ ID NO: 5, or a Lactilactobacillus strain having at least 97% identity, 98% identity, 98.5% identity, 98.6% identity, 98.7% identity, 98.8% identity, 98.9% identity, 99% identity, 99.1% identity, 99.2% identity, 99.3% identity, 99.4% identity, or 99.5% identity in genomic sequence to the sequence of SEQ ID NO: 5,
Lactilactobacillus curvatus ELA204023 having the genomic sequence of SEQ ID NO: 6 or a Lactilactobacillus strain having at least having at least 97% identity, 98% identity, 98.5% identity, 98.6% identity, 98.7% identity, 98.8% identity, 98.9% identity, 99% identity, 99.1% identity, 99.2% identity, 99.3% identity, 99.4% identity, or 99.5% identity in genomic sequence to the sequence of SEQ ID NO: 6,
Lactilactobacillus curvatus ELA204029 having the genomic sequence of SEQ ID NO: 7 or a Lactilactobacillus strain having at least 97% identity, 98% identity, 98.5% identity, 98.6% identity, 98.7% identity, 98.8% identity, 98.9% identity, 99% identity, 99.1% identity, 99.2% identity, 99.3% identity, 99.4% identity, or 99.5% identity in genomic sequence to the sequence of SEQ ID NO: 7,
Lactilactobacillus curvatus ELA204033 having the genomic sequence of SEQ ID NO: 8 or a Lactilactobacillus strain having at least 97% identity, 98% identity, 98.5% identity, 98.6% identity, 98.7% identity, 98.8% identity, 98.9% identity, 99% identity, 99.1% identity, 99.2% identity, 99.3% identity, 99.4% identity, or 99.5% identity in genomic sequence to the sequence of SEQ ID NO: 8, and combinations thereof,
Lactilactobacillus curvatus ELA214059 having the genomic sequence of SEQ ID NO: 9 or a Lactilactobacillus strain having at least 97% identity, 98% identity, 98.5% identity, 98.6% identity, 98.7% identity, 98.8% identity, 98.9% identity, 99% identity, 99.1% identity, 99.2% identity, 99.3% identity, 99.4% identity, or 99.5% identity in genomic sequence to the sequence of SEQ ID NO: 9,
Lactilactobacillus curvatus ELA214060 having the genomic sequence of SEQ ID NO: 10 or a Lactilactobacillus strain having at least having at least 97% identity, 98% identity, 98.5% identity, 98.6% identity, 98.7% identity, 98.8% identity, 98.9% identity, 99% identity, 99.1% identity, 99.2% identity, 99.3% identity, 99.4% identity, or 99.5% identity in genomic sequence to the sequence of SEQ ID NO: 10,
Lactilactobacillus curvatus ELA214061 having the genomic sequence of SEQ ID NO: 11 or a Lactilactobacillus strain having at least 97% identity, 98% identity, 98.5% identity, 98.6% identity, 98.7% identity, 98.8% identity, 98.9% identity, 99% identity, 99.1% identity, 99.2% identity, 99.3% identity, 99.4% identity, or 99.5% identity in genomic sequence to the sequence of SEQ ID NO: 11,
Lactilactobacillus curvatus ELA214062 having the genomic sequence of SEQ ID NO: 12 or a Lactilactobacillus strain having at least 97% identity, 98% identity, 98.5% identity, 98.6% identity, 98.7% identity, 98.8% identity, 98.9% identity, 99% identity, 99.1% identity, 99.2% identity, 99.3% identity, 99.4% identity, or 99.5% identity in genomic sequence to the sequence of SEQ ID NO: 12,
Lactilactobacillus curvatus ELA204092 having the genomic sequence of SEQ ID NO: 13 or a Lactilactobacillus strain having at least 97% identity, 98% identity, 98.5% identity, 98.6% identity, 98.7% identity, 98.8% identity, 98.9% identity, 99% identity, 99.1% identity, 99.2% identity, 99.3% identity, 99.4% identity, or 99.5% identity in genomic sequence to the sequence of SEQ ID NO: 13,
Lactilactobacillus curvatus ELA204096 having the genomic sequence of SEQ ID NO: 14 or a Lactilactobacillus strain having at least having at least 97% identity, 98% identity, 98.5% identity, 98.6% identity, 98.7% identity, 98.8% identity, 98.9% identity, 99% identity, 99.1% identity, 99.2% identity, 99.3% identity, 99.4% identity, or 99.5% identity in genomic sequence to the sequence of SEQ ID NO: 14,
Lactilactobacillus curvatus ELA204098 having the genomic sequence of SEQ ID NO: 15 or a Lactilactobacillus strain having at least 97% identity, 98% identity, 98.5% identity, 98.6% identity, 98.7% identity, 98.8% identity, 98.9% identity, 99% identity, 99.1% identity, 99.2% identity, 99.3% identity, 99.4% identity, or 99.5% identity in genomic sequence to the sequence of SEQ ID NO: 15, or
Lactilactobacillus curvatus ELA214117 having the genomic sequence of SEQ ID NO: 16 or a Lactilactobacillus strain having at least 97% identity, 98% identity, 98.5% identity, 98.6% identity, 98.7% identity, 98.8% identity, 98.9% identity, 99% identity, 99.1% identity, 99.2% identity, 99.3% identity, 99.4% identity, or 99.5% identity in genomic sequence to the sequence of SEQ ID NO: 16; and
wherein said second Lactilactobacillus strain comprises any of the following strains which is different than said first Lactilactobacillus curvatus strain:
Lactilactobacillus curvatus ELA214002 having the genomic sequence of SEQ ID NO: 5, or a Lactilactobacillus strain having at least 97% identity, 98% identity, 98.5% identity, 98.6% identity, 98.7% identity, 98.8% identity, 98.9% identity, 99% identity, 99.1% identity, 99.2% identity, 99.3% identity, 99.4% identity, or 99.5% identity in genomic sequence to the sequence of SEQ ID NO: 5,
Lactilactobacillus curvatus ELA204023 having the genomic sequence of SEQ ID NO: 6 or a Lactilactobacillus strain having at least having at least 97% identity, 98% identity, 98.5% identity, 98.6% identity, 98.7% identity, 98.8% identity, 98.9% identity, 99% identity, 99.1% identity, 99.2% identity, 99.3% identity, 99.4% identity, or 99.5% identity in genomic sequence to the sequence of SEQ ID NO: 6,
Lactilactobacillus curvatus ELA204029 having the genomic sequence of SEQ ID NO: 7 or a Lactilactobacillus strain having at least 97% identity, 98% identity, 98.5% identity, 98.6% identity, 98.7% identity, 98.8% identity, 98.9% identity, 99% identity, 99.1% identity, 99.2% identity, 99.3% identity, 99.4% identity, or 99.5% identity in genomic sequence to the sequence of SEQ ID NO: 7,
Lactilactobacillus curvatus ELA204033 having the genomic sequence of SEQ ID NO: 8 or a Lactilactobacillus strain having at least 97% identity, 98% identity, 98.5% identity, 98.6% identity, 98.7% identity, 98.8% identity, 98.9% identity, 99% identity, 99.1% identity, 99.2% identity, 99.3% identity, 99.4% identity, or 99.5% identity in genomic sequence to the sequence of SEQ ID NO: 8, and combinations thereof,
Lactilactobacillus curvatus ELA214059 having the genomic sequence of SEQ ID NO: 9 or a Lactilactobacillus strain having at least 97% identity, 98% identity, 98.5% identity, 98.6% identity, 98.7% identity, 98.8% identity, 98.9% identity, 99% identity, 99.1% identity, 99.2% identity, 99.3% identity, 99.4% identity, or 99.5% identity in genomic sequence to the sequence of SEQ ID NO: 9,
Lactilactobacillus curvatus ELA214060 having the genomic sequence of SEQ ID NO: 10 or a Lactilactobacillus strain having at least having at least 97% identity, 98% identity, 98.5% identity, 98.6% identity, 98.7% identity, 98.8% identity, 98.9% identity, 99% identity, 99.1% identity, 99.2% identity, 99.3% identity, 99.4% identity, or 99.5% identity in genomic sequence to the sequence of SEQ ID NO: 10,
Lactilactobacillus curvatus ELA214061 having the genomic sequence of SEQ ID NO: 11 or a Lactilactobacillus strain having at least 97% identity, 98% identity, 98.5% identity, 98.6% identity, 98.7% identity, 98.8% identity, 98.9% identity, 99% identity, 99.1% identity, 99.2% identity, 99.3% identity, 99.4% identity, or 99.5% identity in genomic sequence to the sequence of SEQ ID NO: 11,
Lactilactobacillus curvatus ELA214062 having the genomic sequence of SEQ ID NO: 12 or a Lactilactobacillus strain having at least 97% identity, 98% identity, 98.5% identity, 98.6% identity, 98.7% identity, 98.8% identity, 98.9% identity, 99% identity, 99.1% identity, 99.2% identity, 99.3% identity, 99.4% identity, or 99.5% identity in genomic sequence to the sequence of SEQ ID NO: 12,
Lactilactobacillus curvatus ELA204092 having the genomic sequence of SEQ ID NO: 13 or a Lactilactobacillus strain having at least 97% identity, 98% identity, 98.5% identity, 98.6% identity, 98.7% identity, 98.8% identity, 98.9% identity, 99% identity, 99.1% identity, 99.2% identity, 99.3% identity, 99.4% identity, or 99.5% identity in genomic sequence to the sequence of SEQ ID NO: 13,
Lactilactobacillus curvatus ELA204096 having the genomic sequence of SEQ ID NO: 14 or a Lactilactobacillus strain having at least having at least 97% identity, 98% identity, 98.5% identity, 98.6% identity, 98.7% identity, 98.8% identity, 98.9% identity, 99% identity, 99.1% identity, 99.2% identity, 99.3% identity, 99.4% identity, or 99.5% identity in genomic sequence to the sequence of SEQ ID NO: 14,
Lactilactobacillus curvatus ELA204098 having the genomic sequence of SEQ ID NO: 15 or a Lactilactobacillus strain having at least 97% identity, 98% identity, 98.5% identity, 98.6% identity, 98.7% identity, 98.8% identity, 98.9% identity, 99% identity, 99.1% identity, 99.2% identity, 99.3% identity, 99.4% identity, or 99.5% identity in genomic sequence to the sequence of SEQ ID NO: 15,
Lactilactobacillus curvatus ELA214117 having the genomic sequence of SEQ ID NO: 16 or a Lactilactobacillus strain having at least 97% identity, 98% identity, 98.5% identity, 98.6% identity, 98.7% identity, 98.8% identity, 98.9% identity, 99% identity, 99.1% identity, 99.2% identity, 99.3% identity, 99.4% identity, or 99.5% identity in genomic sequence to the sequence of SEQ ID NO: 16,
Lactilactobacillus fuchuensis ELA214068 having the genomic sequence of SEQ ID NO: 17 or a Lactilactobacillus strain having at least 97% identity, 98% identity, 98.5% identity, 98.6% identity, 98.7% identity, 98.8% identity, 98.9% identity, 99% identity, 99.1% identity, 99.2% identity, 99.3% identity, 99.4% identity, or 99.5% identity in genomic sequence to the sequence of SEQ ID NO: 17,
Lactilactobacillus sakei ELA214064 having the genomic sequence of SEQ ID NO: 18 or a Lactilactobacillus strain having at least 97% identity, 98% identity, 98.5% identity, 98.6 % identity, 98.7% identity, 98.8% identity, 98.9% identity, 99% identity, 99.1% identity, 99.2% identity, 99.3% identity, 99.4% identity, or 99.5% identity in genomic sequence to the sequence of SEQ ID NO: 18, or
Lactilactobacillus sakei ELA214065 having the genomic sequence of SEQ ID NO: 19, or a Lactilactobacillus strain having at least 97% identity, 98% identity, 98.5% identity, 98.6% identity, 98.7% identity, 98.8% identity, 98.9% identity, 99% identity, 99.1% identity, 99.2% identity, 99.3% identity, 99.4% identity, or 99.5% identity in genomic sequence to the sequence of SEQ ID NO: 19.

4. (canceled)

5. (canceled)

6. (canceled)

7. (canceled)

8. (canceled)

9. The probiotic composition of claim 1, wherein a ratio of said first Lactilactobacillus curvatus strain and said second Lactilactobacillus strain is 0.75-1.5:1 or 1:0.75-1.5.

10. The probiotic composition of claim 1 comprising isolated Lactilactobacillus species, and a carrier suitable for animal administration, said isolated Lactilactobacillus species comprising at least two of the following:
ELA204093 corresponding to ATCC deposit PTA-127116 or a Lactilactobacillus strain having at least 97% identity, 98% identity, 98.5% identity, 98.6% identity, 98.7% identity, 98.8% identity, 98.9% identity, 99% identity, 99.1% identity, 99.2% identity, 99.3% identity, 99.4% identity, or 99.5% identity in genomic sequence to the sequence of SEQ ID NO: 1;
ELA204100 corresponding to ATCC deposit PTA-127117 or a Lactilactobacillus strain having at least 97% identity, 98% identity, 98.5% identity, 98.6% identity, 98.7% identity, 98.8% identity, 98.9% identity, 99% identity, 99.1% identity, 99.2% identity, 99.3% identity, 99.4% identity, or 99.5% identity in genomic sequence to the sequence of SEQ ID NO: 2;
ELA214388 corresponding to ATCC deposit PTA-127118 or a Lactilactobacillus strain having at least 97% identity, 98% identity, 98.5% identity, 98.6% identity, 98.7% identity, 98.8% identity, 98.9% identity, 99% identity, 99.1% identity, 99.2% identity, 99.3% identity, 99.4% identity, or 99.5% identity in genomic sequence to the sequence of SEQ ID NO: 3; or
ELA214391 corresponding to ATCC deposit PTA-127119 or a Lactilactobacillus strain having at least 97% identity, 98% identity, 98.5% identity, 98.6% identity, 98.7% identity, 98.8% identity, 98.9% identity, 99% identity, 99.1% identity, 99.2% identity, 99.3% identity, 99.4% identity, or 99.5% identity in genomic sequence to the sequence of SEQ ID NO: 4.

11. The A probiotic composition of claim 1 comprising a first isolated Lactilactobacillus curvatus strain and a second isolated Lactilactobacillus strain; and a carrier suitable for animal administration;
wherein said composition reduces or inhibits the colonization of an animal by a pathogenic bacterium or provides improved growth performance in an animal when an effective amount is administered to an animal, as compared to an animal not administered the composition; and
(a) wherein the first isolated Lactilactobacillus curvatus strain comprises a nucleic acid sequence having at least 97% identity, 98% identity, 98.5% identity, 98.6% identity, 98.7% identity, 98.8% identity, 98.9% identity, 99% identity, 99.1% identity, 99.2% identity, 99.3% identity, 99.4% identity, or 99.5% identity in genomic sequence to the sequence of SEQ ID NO: 1 and wherein the second isolated Lactilactobacillus strain comprises a nucleic acid sequence having at least 97% identity, 98% identity, 98.5% identity, 98.6% identity, 98.7% identity, 98.8 % identity, 98.9% identity, 99% identity, 99.1% identity, 99.2% identity, 99.3% identity, 99.4% identity, or 99.5% identity in genomic sequence to the sequence of SEQ ID NO: 2; or
(b) wherein the first isolated Lactilactobacillus curvatus strain comprises a nucleic acid sequence having at least 97% identity, 98% identity, 98.5% identity, 98.6% identity, 98.7% identity, 98.8% identity, 98.9% identity, 99% identity, 99.1% identity, 99.2% identity, 99.3% identity, 99.4% identity, or 99.5% identity in genomic sequence to the sequence of SEQ ID NO: 3 and wherein the second isolated Lactilactobacillus strain comprises a nucleic acid sequence having at least 97% identity, 98% identity, 98.5% identity, 98.6% identity, 98.7% identity, 98.8% identity, 98.9% identity, 99% identity, 99.1% identity, 99.2% identity, 99.3% identity, 99.4% identity, or 99.5% identity in genomic sequence to the sequence of SEQ ID NO: 4; or
(c) wherein the first isolated Lactilactobacillus curvatus strain comprises a nucleic acid sequence having at least 97% identity, 98% identity, 98.5% identity, 98.6% identity, 98.7% identity, 98.8% identity, 98.9% identity, 99% identity, 99.1% identity, 99.2% identity, 99.3% 1, and wherein the second isolated Lactilactobacillus strain comprises a nucleic acid sequence having at least 97% identity, 98% identity, 98.5% identity, 98.6% identity, 98.7% identity, 98.8% identity, 98.9% identity, 99% identity, 99.1% identity, 99.2% identity, 99.3% identity, 99.4% identity, or 99.5% identity in genomic sequence to the sequence of SEQ ID NO: 3; or
(d) wherein the first isolated Lactilactobacillus curvatus strain comprises a nucleic acid sequence having at least 97% identity, 98% identity, 98.5% identity, 98.6% identity, 98.7% identity, 98.8% identity, 98.9% identity, 99% identity, 99.1% identity, 99.2% identity, 99.3% identity, 99.4% identity, or 99.5% identity in genomic sequence to the sequence of SEQ ID NO: 2; and wherein the second isolated Lactilactobacillus strain comprises a nucleic acid sequence having at least 97% identity, 98% identity, 98.5% identity, 98.6% identity, 98.7% identity, 98.8% identity, 98.9% identity, 99% identity, 99.1% identity, 99.2% identity, 99.3% identity, 99.4% identity, or 99.5% identity in genomic sequence to the sequence of SEQ ID NO: 4.

12. (canceled)

13. (canceled)

14. The probiotic composition of claim 1 further comprising at least one Bacillus species wherein the Bacillus species is Bacillus velezensis, Bacillus subtilis, or a combination thereof.

15. (canceled)

16. The probiotic composition of claim 14 wherein the Bacillus species comprises at least one of B. amyloliquefaciens ELA191024, B. subtilis ELA191105, B. amyloliquefaciens ELA202071, and combinations thereof.

17. The probiotic composition of claim 1, wherein said first Lactilactobacillus curvatus strain and said second Lactilactobacillus strain do not have any identifiable antimicrobial resistance genes or only have one antimicrobial resistance gene.

18. (canceled)

19. The probiotic composition of, wherein said first Lactilactobacillus curvatus strain and said second Lactilactobacillus strain do not have any identifiable genes involved in biogenic amines and toxins or only have one gene involved in biogenic amines and toxins.

20. (canceled)

21. The probiotic composition of 1-12, wherein said first Lactilactobacillus curvatus strain and said second Lactilactobacillus strain are sensitive to an antibiotic selected from at least one of Ampicillin, Vancomycin, Gentamicin, Kanamycin, Streptomycin, Erythromycin, Clindamycin, Tetracycline, Chloramphenicol, or combinations thereof.

22. (canceled)

23. The probiotic composition of claim 1, wherein the probiotic composition is in the form of a liquid, dry powder, pellets, suspension, or a combination thereof.

24. The probiotic composition of claim 1, wherein the probiotic composition comprises between about 1×10⁶ and 1×10⁹ CFU/g of said first Lactilactobacillus curvatus strain and said second Lactilactobacillus strain, wherein the probiotic composition comprises at least about 1×10⁶, 1×10⁷ CFU/g, 1×10⁸ CFU/g, or 1×10⁹ CFU/g of said first Lactilactobacillus curvatus strain and said second Lactilactobacillus strain, or comprising from about 1×10⁴ to about 1×10¹⁰ viable spores per gram dry weight of said first Lactilactobacillus curvatus strain and said second Lactilactobacillus strain.

25. (canceled)

26. (canceled)

27. The probiotic composition of claim 1 further comprising a prebiotic, inulin, vitamin D, vitamin C, zinc, N-acetyl-glucosamine, galactooligosaccharides (GOS), lactose, or combinations thereof.

28. (canceled)

29. (canceled)

30. The probiotic composition of claim 1 wherein said first Lactilactobacillus curvatus strain and said second Lactilactobacillus strain are not genetically engineered.

31. (canceled)

32. A direct fed microbial comprising the composition of claim 1 wherein the composition is formulated as animal feed, feed additive, food ingredient, water additive, water-mixed additive, consumable solution, consumable spray additive, consumable solid, consumable gel, injection, or combinations thereof.

33. A fish food product, wherein the fish food product is in the form of pellets, powder, granules, or a combination thereof, comprising the probiotic composition of claim 1, wherein the fish food product comprises about 3-8% w/w of lyophilized said first Lactilactobacillus curvatus strain and said second Lactilactobacillus strain or wherein the fish food product comprises about 0.01-0.2% w/w spray dried spores of said first Lactilactobacillus curvatus strain and said second Lactilactobacillus strain, optionally further comprising food-grade excipients.

34. (canceled)

35. (canceled)

36. (canceled)

37. (canceled)

38. A method for improving feed efficiency in an animal comprising administering to the animal the probiotic composition of claim 1.

39. The method of claim 38 wherein the animal is a fish or is poultry.

40. (canceled)

41. (canceled)

42. (canceled)

43. The method of claim 38 39 wherein the administration is effective in at least one of: improving growth performance, increasing antioxidants, improving immune response, improving survival, and improving performance selected from average daily feed intake (ADFI), average daily gain (ADG) and feed conversion ratio (FCR) as compared to an animal not administered the composition.

44. The method of claim 38 wherein the animal administered the composition exhibits a feed conversion ratio that is decreased by at least 1%, at least 5%, at least 6%, at least 7%, at least 8%, at least 9%, at least 10%, or at least 15%, or exhibits a weight that is increased by at least 1%, at least 5%, at least 10%, at least 15%, at least 25%, or at least 50% as compared to an animal not administered the composition.

45. (canceled)

46. The method of claim 38 wherein the administration improves at least one of humoral immune modulation, bacteriocin production, lymphocyte modulation, and inhibits pathogens and combinations thereof.

47. The method of claim 46 wherein the pathogens are aquatic pathogens and are Aeromonas.

48. (canceled)

49. (canceled)

50. (canceled)

51. (canceled)

52. A method for reducing or inhibiting the colonization of an animal by a pathogenic bacterium or improving disease resistance in an animal comprising administering to an animal an effective amount of the probiotic composition of claim 1.

53. The method of claim 52 wherein the administration is effective in at least one of: improving growth performance, increasing antioxidants, improving immune response and improving survival, as compared to an animal not administered the composition.

54. The method of claim 52 with the proviso that said administration does not comprise administration of an antibiotic.

55. The method of claim 52 wherein said administration is to a salmon and wherein the administration alleviates, or reduces an infection from at least one of Piscirikettsia salmonis and Tanacibaculum maritimum or wherein the administration of the probiotic composition treats, alleviates, or reduces at least one of salmon rickettsial septicemia (SRS) and fit rot.

56. (canceled)

57. (canceled)

58. (canceled)

59. The method of claim 52 wherein the animal is human, non-human, poultry which includes chicken and turkey, bird, cattle, swine, fish, cat, or dog.

60. The method of claim 52 wherein mortality rate is decreased by at least 1%, at least 5%, at least 10%, at least 15%, at least 25%, or at least 50%, or wherein the administration results in said animal exhibiting an improved gut characteristic, as compared to an animal not administered the probiotic composition; wherein said improved gut characteristic includes at least one of: decreasing pathogen-associated lesion formation in the gastrointestinal tract, increasing feed digestibility, increasing meat quality, modulating microbiome, improving short chain fatty acids, and increasing gut health by reducing permeability and inflammation as compared to an animal not administered the probiotic composition.

61. (canceled)

62. The method of claim 60 wherein the pathogen-associated lesion formation in the gastrointestinal tract of the animal administered the probiotic composition is decreased by at least 1%, at least 5%, at least 10%, at least 15%, at least 25%, or at least 50%, as compared to an animal not administered the probiotic composition.
